(19) United States
(12) Patent Application Publication
(10) Pub. No.: US 2002/0042386 A1
(43) Pub. Date: Apr. 11, 2002

(54) Nucleic acids, proteins, and antibodies

(76) Inventors: Craig A. Rosen, Laytonsville, MD (US); Steven M. Ruben, Olney, MD (US); Steven C. Barash, Rockville, MD (US)

Correspondence Address: HUMAN GENOME SCIENCES INC, 9410 KEY WEST AVENUE, ROCKVILLE, MD, 20850

(21) Appl. No.: 09/764,870

(22) Filed: Jan. 17, 2001

Related U.S. Application Data
(60) Provisional application No. 60/179,065, filed on Jan. 31, 2000.
(60) Provisional application No. 60/180,628, filed on Feb. 4, 2000.
(60) Provisional application No. 60/214,886, filed on Jun. 28, 2000.
(60) Provisional application No. 60/217,487, filed on Jul. 11, 2000.
(60) Provisional application No. 60/225,758, filed on Aug. 14, 2000.
(60) Provisional application No. 60/220,963, filed on Jul. 26, 2000.
(60) Provisional application No. 60/217,496, filed on Jul. 11, 2000.
(60) Provisional application No. 60/225,447, filed on Aug. 14, 2000.
(60) Provisional application No. 60/218,290, filed on Jul. 14, 2000.
(60) Provisional application No. 60/225,757, filed on Aug. 14, 2000.
(60) Provisional application No. 60/226,868, filed on Aug. 22, 2000.
(60) Provisional application No. 60/216,647, filed on Jul. 7, 2000.
(60) Provisional application No. 60/225,267, filed on Aug. 14, 2000.
(60) Provisional application No. 60/216,880, filed on Jul. 7, 2000.
(60) Provisional application No. 60/225,270, filed on Aug. 14, 2000.
(60) Provisional application No. 60/251,869, filed on Dec. 8, 2000.
(60) Provisional application No. 60/235,834, filed on Sep. 27, 2000.
(60) Provisional application No. 60/234,274, filed on Sep. 21, 2000.
(60) Provisional application No. 60/234,223, filed on Sep. 21, 2000.
(60) Provisional application No. 60/228,924, filed on Aug. 30, 2000.
(60) Provisional application No. 60/224,518, filed on Aug. 14, 2000.
(60) Provisional application No. 60/236,369, filed on Sep. 29, 2000.
(60) Provisional application No. 60/224,519, filed on Aug. 14, 2000.
(60) Provisional application No. 60/220,964, filed on Jul. 26, 2000.
(60) Provisional application No. 60/241,809, filed on Oct. 20, 2000.
(60) Provisional application No. 60/249,299, filed on Nov. 17, 2000.
(60) Provisional application No. 60/236,327, filed on Sep. 29, 2000.
(60) Provisional application No. 60/241,785, filed on Oct. 20, 2000.
(60) Provisional application No. 60/244,617, filed on Nov. 1, 2000.
(60) Provisional application No. 60/225,268, filed on Aug. 14, 2000.
(60) Provisional application No. 60/236,368, filed on Sep. 29, 2000.
(60) Provisional application No. 60/251,856, filed on Dec. 8, 2000.
(60) Provisional application No. 60/251,868, filed on Dec. 8, 2000.
(60) Provisional application No. 60/229,344, filed on Sep. 1, 2000.
(60) Provisional application No. 60/234,997, filed on Sep. 25, 2000.
(60) Provisional application No. 60/229,343, filed on Sep. 1, 2000.
(60) Provisional application No. 60/229,345, filed on Sep. 1, 2000.
(60) Provisional application No. 60/229,287, filed on Sep. 1, 2000.
(60) Provisional application No. 60/229,513, filed on Sep. 5, 2000.
(60) Provisional application No. 60/231,413, filed on Sep. 8, 2000.
(60) Provisional application No. 60/229,509, filed on Sep. 5, 2000.
(60) Provisional application No. 60/236,367, filed on Sep. 29, 2000.
(60) Provisional application No. 60/237,039, filed on Oct. 2, 2000.
(60) Provisional application No. 60/237,038, filed on Oct. 2, 2000.
(60) Provisional application No. 60/236,370, filed on Sep. 29, 2000.
(60) Provisional application No. 60/236,802, filed on Oct. 2, 2000.
(60) Provisional application No. 60/237,037, filed on Oct. 2, 2000.
(60) Provisional application No. 60/237,040, filed on Oct. 2, 2000.
(60) Provisional application No. 60/240,960, filed on Oct. 20, 2000.
(60) Provisional application No. 60/239,935, filed on Oct. 13, 2000.

(51) Int. Cl. A61K 48/00; C12Q 1/68; C07H 21/04; C12P 21/02; C12N 5/06

(52) U.S. Cl. 514/44; 536/23.1; 435/325; 435/69.1; 435/6

(57) ABSTRACT

The present invention relates to novel proteins. More specifically, isolated nucleic acid molecules are provided encoding novel polypeptides. Novel polypeptides and antibodies that bind to these polypeptides are provided. Also provided are vectors, host cells, and recombinant and synthetic methods for producing human polynucleotides and/or polypeptides, and antibodies. The invention further relates to diagnostic and therapeutic methods useful for diagnosing, treating, preventing and/or prognosing disorders related to these novel polypeptides. The invention further relates to screening methods for identifying agonists and antagonists of polynucleotides and polypeptides of the invention. The present invention further relates to methods and/or compositions for inhibiting or enhancing the production and function of the polypeptides of the present invention.

### STATEMENT UNDER 37 C. FR. § 1.77(b)(4)

[0001] This application refers to a “Sequence Listing” listed below, which is provided as an electronic document on two identical compact discs (CD-R), labeled “Copy 1” and “Copy 2.” These compact discs each contain the following files, which are hereby incorporated in their entirety herein:

| | | Size in | Date of |
|---|---|---|---|
| Document | File Name | bytes | Creation |
| Sequence Listing | PTZ14_seqList.txt | 1,422,582 | 01/15/2001 |
| V Viewer Setup File | SetupDLL.exe | 695,808 | 12/19/2000 |
| V Viewer Help | v.cnt | 7,984 | 01/05/2001 |
| File Controller | | | |
| V Viewer Program File | v.exe | 753,664 | 12/19/2000 |
| V Viewer Help File | v.hlp | 447,766 | 01/05/2001 |

[0002] The Sequence Listing may be viewed on an IBM-PC machine running the MS-Windows operating system by using the V viewer software, licensed by HGS, Inc., included on the compact discs (see World Wide Web URL: http://www.fileviewer.com).

### FIELD OF THE INVENTION

[0003] The present invention relates to novel proteins. More specifically, isolated nucleic acid molecules are provided encoding novel polypeptides. Novel polypeptides and antibodies that bind to these polypeptides are provided. Also provided are vectors, host cells, and recombinant and synthetic methods for producing human polynucleotides and/or polypeptides, and antibodies. The invention further relates to diagnostic and therapeutic methods useful for diagnosing, treating, preventing and/or prognosing disorders related to these novel polypeptides. The invention further relates to screening methods for identifying agonists and antagonists of polynucleotides and polypeptides of the invention. The present invention further relates to methods and/or compositions for inhibiting or enhancing the production and function of the polypeptides of the present invention.

### BACKGROUND OF THE INVENTION

[0004] Many eukaryotic cells are enveloped by an extracellular matrix composed of different combinations of fibrous collagen proteins, hyaluronic acid, heparan sulfate proteoglycans (HSGPs), and other polysaccharides and proteoglycans that provide structural support, tissue identity, and autocrine, paracrine, and juxtacrine properties within its environment (McGowan, S. E., FASEB J, 6:2895-2904 (1992)).

[0005] Extracellular matrix proteins are thought to play roles in extracellular matrix formation and bone mineralization, the inflammatory response, regulation of tissue differentiation and/or maturation (e.g., airway branching in lung development), tissue degradation, and establishing cell polarity (McGowan, S. E., (1992); Francomano, C. A., et al., Curr. Opin. Genet. Dev., 6:301-308 (1996); Roman, J., Immunol. Res., 15:163-178 (1996); Bhalerao, J., et al., J. Biol. Chem., 270:16385-394 (1995)).

[0006] As demonstrated, extracellular matrix proteins play a wide variety of vital roles in the development and maintanence of organs, tissues, and support structures in the body. Disorders involving these extracellular matrix proteins can result in a wide variety of disorders, such as cancer metastasis and inflammatory disorders including arthritis, for example.

[0007] Some examples of the protein families which are thought to be involved with the maintenance, function, and degradation of the extracellular matrix include syndecan, heparanase, integrin, osteopontin, link, cadherin, laminin type EGF, lectin, fibronectin, notch, and matrixin. Descriptions of some of these proteins (the matrix proteins) and diseases associated with their dysfunction follow.

[0008] Integrin:

[0009] The integrins are a family of cell-surface glycoproteins that act as receptors involved in the adhesion of cells to the extracellular matrix, as well as finctioning as mediators of cell-to-cell interactions. Integrins are heterodimers containing alpha and beta subunits typically composed of an extracellular domain, a transmembrane domain, and a small cytoplasmic tail (Aplin, A. E., et al., Pharm. Rev., 50:197-263 (1998)). Typical ligands for these receptors are large extracellular matrix proteins such as collagen, laminin, fibronectin, or vitronectin.

[0010] It is thought that antagonists such as small molecules, short peptides, or antibodies directed against the extracellular portion of these receptors would be useful in eliminating and/or preventing the effects of a number of diseases, such as coagulation disorders, inflammation and/or cancer, where it is thought that integrins may play a role. Aside from these roles, integrins are also believed to function in signal transduction.

[0011] Clearly, the identification and/or characterization of novel integrin proteins, and/or their corresponding subunits, will potentially have application in a wide variety of diseases and/or disorders, such as osteoporosis, atherosclerosis, arthritis, coagulation disorders, inflammation, and cancers.

[0012] Thus, there exists a clear need for identifying and exploiting novel integrin proteins. Although structurally related, such proteins may possess diverse and multifaceted functions in a variety of cell and tissue types. The inventive purified integrin proteins are useful as research tools useful for the identification, characterization and purification of additional molecules involved in cellular migration, extracellular matrix modeling, and wound healing, and the regulation thereof. Furthermore, the identification of new integrin encoding genes permits the development of a range of derivatives, agonists and antagonists at the nucleic acid and protein levels which in turn have applications in the treatment and diagnosis of a wide-range of conditions such as aberrant wound-healing, osteoporosis, atherosclerosis, arthritis, coagulation disorders, inflammation, and cancers.

[0013] Cadherin:

[0014] The cadherins are a family of calcium-dependent homotypic cell-cell adhesion molecules. Conformationally, cadherin family members are thought to contain 5 tandem external cadherin repeats in the extracellular portion of the molecule, a single transmembrane domain, and a cytoplasmic tail containing approximately 150 amino acids (Aplin, A. E., et al., Pharm. Rev., 50:197-263 (1998)).

[0015] Cadherins are thought to perform a primary role in cell-cell adhesion and interaction. Cadherins localize in specialized sites of cell-to-cell adhesion termed adherence junctions, where they can establish linkages with the actin-containing cytoskeleton. It is thought that cadherin-mediated cell-cell adhesion involves a “zipper” type of organization where the N-termini of cadherin molecules on one cellular surface form a series of rigid dimers that interact with equivalent dimers on the opposing cellular surface. (Aplin, A. E., et al., Pharm. Rev., 50:197-263 (1998)).

[0016] The loss of expression or function of cadherins may result in severe pathophysiological disorders. For example, the loss or mutation of E-cadherin is thought to be involved with the progression of the malignant, invasive phenotype of epithelial tumors.

[0017] Clearly, the identification and/or characterization of novel cadherin proteins will potentially have application in a wide variety of diseases and/or disorders, such as osteoporosis, atherosclerosis, arthritis, coagulation disorders, inflammation, and cancers.

[0018] Thus, there exists a clear need for identifying and exploiting novel cadherin proteins. Although structurally related, such proteins may possess diverse and multifaceted functions in a variety of cell and tissue types. The inventive purified cadherin proteins are useful as research tools useful for the identification, characterization and purification of additional molecules involved in cellular migration, extracellular matrix modeling, and wound healing, and the regulation thereof. Furthermore, the identification of new cadherin encoding genes permits the development of a range of derivatives, agonists and antagonists at the nucleic acid and protein levels which in turn have applications in the treatment and diagnosis of a wide-range of conditions such as aberrant wound-healing, osteoporosis, atherosclerosis, arthritis, coagulation disorders, inflammation, and cancers.

[0019] Heparanase:

[0020] Heparan sulfate proteoglycans (HSGPs) are distributed throughout the extracellular matrix, where they are thought to play roles in self-assembly and insolubility of extracellular matrix components, cell adhesion, and locomotion (Vlodavsky, I., et al., Nat. Med., 5:793-802 (1999)). HSGPs are found in capillaries in the subendothelial basement membrane, where they provide a supporting role to the vascular endothelium and stability to the structure of the capillary wall. Cleavage of heparan sulfate therefore is necessary for the liberation of blood-borne cells. A heparan sulfate degrading endoglycosidase, known as heparanase, has been identified in human (Vlodavsky, I., et al., (1999)).

[0021] The human heparanase protein was preferentially expressed in metastatic cell lines and specimens of breast, colon, and liver carcinomas. Thus, it is thought that the heparanase may play a role in facilitating metastatic carcinomas, perhaps through the degredation of heparan sulfate, for example. Accordingly, antibodies directed against the heparanase protein may be useful for preventing and/or treating metastatic carcinomas, particularly by preventing the mobility of the cancer cell(s) to spread to local as well as distant areas of the body.

[0022] Clearly, the identification and/or characterization of novel heparanase proteins will potentially have application in a wide variety of diseases and/or disorders, such as metastatic cancers.

[0023] Thus, there exists a clear need for identifying and exploiting novel heparanase proteins. Although structurally related, such proteins may possess diverse and multifaceted functions in a variety of cell and tissue types. The inventive purified heparanase proteins are useful as research tools useful for the identification, characterization and purification of additional molecules involved in metastatic cancers. Furthermore, the identification of new heparanase encoding genes permits the development of a range of derivatives, agonists, and particularly antagonists, at the nucleic acid and protein levels which in turn have applications in the treatment and diagnosis of a wide-range of conditions such as metastatic cancers.

[0024] Thus there exists a clear need for identifying and exploiting novel extracellular matrix polynucleotides and polypeptides. Although structurally related, such proteins may possess diverse and multifaceted functions in a variety of cell and tissue types. The purified extracellular matrix polypeptides of the invention are research tools useful for the identification, characterization and purification of additional proteins involved in aberrant wound-healing, osteoporosis, atherosclerosis, arthritis, coagulation disorders, inflammation, and cancers. Furthermore, the identification of new extracellular matrix polynucleotides and polypeptides permits the development of a range of derivatives, agonists and antagonists at the nucleic acid and protein levels which in turn have applications in the treatment and diagnosis of a range of conditions such as, for example, aberrant wound-healing, osteoporosis, atherosclerosis, arthritis, coagulation disorders, inflammation, and cancers, amongst other conditions.

### SUMMARY OF THE INVENTION

[0025] The present invention relates to novel proteins. More specifically, isolated nucleic acid molecules are provided encoding novel polypeptides. Novel polypeptides and antibodies that bind to these polypeptides are provided. Also provided are vectors, host cells, and recombinant and synthetic methods for producing human polynucleotides and/or polypeptides, and antibodies. The invention further relates to diagnostic and therapeutic methods useful for diagnosing, treating, preventing and/or prognosing disorders related to these novel polypeptides. The invention further relates to screening methods for identifying agonists and antagonists of polynucleotides and polypeptides of the invention. The present invention further relates to methods and/or compositions for inhibiting or enhancing the production and function of the polypeptides of the present invention.

### DETAILED DESCRIPTION

[0026] Tables

[0027] Table 1A summarizes some of the polynucleotides encompassed by the invention (including cDNA clones related to the sequences (Clone ID NO:Z), contig sequences (contig identifier (Contig ID:) and contig nucleotide sequence identifier (SEQ ID NO:X)) and further summarizes certain characteristics of these polynucleotides and the polypeptides encoded thereby. The first column provides the gene number in the application for each clone identifier. The second column provides a unique clone identifier, “Clone ID NO:Z”, for a cDNA clone related to each contig sequence disclosed in Table 1A. The third column provides a unique contig identifier, “Contig ID:” for each of the contig sequences disclosed in Table 1A. The fourth column provides the sequence identifier, “SEQ ID NO:X”, for each of the contig sequences disclosed in Table 1A. The fifth column, “ORF (From-To)”, provides the location (i.e., nucleotide position numbers) within the polynucleotide sequence of SEQ ID NO:X that delineate the preferred open reading frame (ORF) that encodes the amino acid sequence shown in the sequence listing and referenced in Table 1A as SEQ ID NO:Y (column 6). Column 7 lists residues comprising predicted epitopes contained in the polypeptides encoded by each of the preferred ORFs (SEQ ID NO:Y). Identification of potential immunogenic regions was performed according to the method of Jameson and Wolf (CABIOS, 4; 181-186 (1988)); specifically, the Genetics Computer Group (GCG) implementation of this algorithm, embodied in the program PEPTIDESTRUCTURE (Wisconsin Package v10.0, Genetics Computer Group (GCG), Madison, Wisc.). This method returns a measure of the probability that a given residue is found on the surface of the protein. Regions where the antigenic index score is greater than 0.9 over at least 6 amino acids are indicated in Table 1A as “Predicted Epitopes”. In particular embodiments, polypeptides of the invention comprise, or alternatively consist of, one, two, three, four, five or more of the predicted epitopes described in Table 1A. It will be appreciated that depending on the analytical criteria used to predict antigenic determinants, the exact address of the determinant may vary slightly. Column 8, “Tissue Distribution” shows the expression profile of tissue, cells, and/or cell line libraries which express the polynucleotides of the invention. The first number in column 8 (preceding the colon), represents the tissue/cell source identifier code corresponding to the key provided in Table 4. Expression of these polynucleotides was not observed in the other tissues and/or cell libraries tested. For those identifier codes in which the first two letters are not “AR”, the second number in column 8 (following the colon), represents the number of times a sequence corresponding to the reference polynucleotide sequence (e.g., SEQ ID NO:X) was identified in the tissue/cell source. Those tissue/cell source identifier codes in which the first two letters are “AR” designate information generated using DNA array technology. Utilizing this technology, cDNAs were amplified by PCR and then transferred, in duplicate, onto the array. Gene expression was assayed through hybridization of first strand cDNA probes to the DNA array. cDNA probes were generated from total RNA extracted from a variety of different tissues and cell lines. Probe synthesis was performed in the presence of ³³P dCTP, using oligo(dT) to prime reverse transcription. After hybridization, high stringency washing conditions were employed to remove non-specific hybrids from the array. The remaining signal, emanating from each gene target, was measured using a Phosphorimager. Gene expression was reported as Phosphor Stimulating Luminescence (PSL) which reflects the level of phosphor signal generated from the probe hybridized to each of the gene targets represented on the array. A local background signal subtraction was performed before the total signal generated from each array was used to normalize gene expression between the different hybridizations. The value presented after “[array code]:” represents the mean of the duplicate values, following background subtraction and probe normalization. One of skill in the art could routinely use this information to identify normal and/or diseased tissue(s) which show a predominant expression pattern of the corresponding polynucleotide of the invention or to identify polynucleotides which show predominant and/or specific tissue and/or cell expression. Column 9 provides the chromosomal location of polynucleotides corresponding to SEQ ID NO:X. Chromosomal location was determined by finding exact matches to EST and cDNA sequences contained in the NCBI (National Center for Biotechnology Information) UniGene database. Given a presumptive chromosomal location, disease locus association was determined by comparison with the Morbid Map, derived from Online Mendelian Inheritance in Man (Online Mendelian hiheritance in Man, OMIMTM. McKusick-Nathans Institute for Genetic Medicine, Johns Hopkins University (Baltimore, Md.) and National Center for Biotechnology Information, National Library of Medicine (Bethesda, Md.) 2000. World Wide Web URL: http://www.ncbi.nlm.nih.gov/omim/). If the putative chromosomal location of the Query overlaps with the chromosomal location of a Morbid Map entry, an OMIM identification number is disclosed in column 10 labeled “OMIM Disease Reference(s)”. A key to the OMIM reference identification numbers is provided in Table 5.

[0028] Table 1B summarizes additional polynucleotides encompassed by the invention (including cDNA clones related to the sequences (Clone ID NO:Z), contig sequences (contig identifier (Contig ID:) contig nucleotide sequence identifiers (SEQ ID NO:X)), and genomic sequences (SEQ ID NO:B). The first column provides a unique clone identifier, “Clone ID NO:Z”, for a cDNA clone related to each contig sequence. The second column provides the sequence identifier, “SEQ ID NO:X”, for each contig sequence. The third column provides a unique contig identifier, “Contig ID:” for each contig sequence. The fourth column, provides a BAC identifier “BAC ID NO:A” for the BAC clone referenced in the corresponding row of the table. The fifth column provides the nucleotide sequence identifier, “SEQ ID NO:B” for a fragment of the BAC clone identified in column four of the corresponding row of the table. The sixth column, “Exon From-To”, provides the location (i.e., nucleotide position numbers) within the polynucleotide sequence of SEQ ID NO:B which delineate certain polynucleotides of the invention that are also exemplary members of polynucleotide sequences that encode polypeptides of the invention (e.g., polypeptides containing amino acid sequences encoded by the polynucleotide sequences delineated in column six, and fragments and variants thereof).

[0029] Table 2 summarizes homology and features of some of the polypeptides of the invention. The first column provides a unique clone identifier, “Clone ID NO:Z”, corresponding to a cDNA clone disclosed in Table 1A. The second column provides the unique contig identifier, “Contig ID:” corresponding to contigs in Table 1A and allowing for correlation with the information in Table 1A. The third column provides the sequence identifier, “SEQ ID NO:X”, for the contig polynucleotide sequence. The fourth column provides the analysis method by which the homology/identity disclosed in the Table was determined. Comparisons were made between polypeptides encoded by the polynucleotides of the invention and either a non-redundant protein database (herein referred to as “NR”), or a database of protein families (herein referred to as “PFAM”) as further described below. The fifth column provides a description of the PFAM/NR hit having a significant match to a polypeptide of the invention. Column six provides the accession number of the PFAM/NR hit disclosed in the fifth column. Column seven, “Score/Percent Identity”, provides a quality score or the percent identity, of the hit disclosed in columns five and six. Columns 8 and 9, “NT From” and “NT To” respectively, delineate the polynucleotides in “SEQ ID NO:X” that encode a polypeptide having a significant match to the PFAM/NR database as disclosed in the fifth and sixth columns. In specific embodiments polypeptides of the invention comprise, or alternatively consist of, an amino acid sequence encoded by a polynucleotide in SEQ ID NO:X as delineated in columns 8 and 9, or fragments or variants thereof.

[0030] Table 3 provides polynucleotide sequences that may be disclaimed according to certain embodiments of the invention. The first column provides a unique clone identifier, “Clone ID”, for a cDNA clone related to contig sequences disclosed in Table 1A. The second column provides the sequence identifier, “SEQ ID NO:X”, for contig sequences disclosed in Table 1A. The third column provides the unique contig identifier, “Contig ID:”, for contigs disclosed in Table 1A. The fourth column provides a unique integer ‘a’ where ‘a’ is any integer between 1 and the final nucleotide minus 15 of SEQ ID NO:X, and the fifth column provides a unique integer ‘b’ where ‘b’ is any integer between 15 and the final nucleotide of SEQ ID NO:X, where both a and b correspond to the positions of nucleotide residues shown in SEQ ID NO:X, and where b is greater than or equal to a+14. For each of the polynucleotides shown as SEQ ID NO:X, the uniquely defined integers can be substituted into the general formula of a−b, and used to describe polynucleotides which may be preferably excluded from the invention. In certain embodiments, preferably excluded from the invention are at least one, two, three, four, five, ten, or more of the polynucleotide sequence(s) having the accession number(s) disclosed in the sixth column of this Table (including for example, published sequence in connection with a particular BAC clone). In further embodiments, preferably excluded from the invention are the specific polynucleotide sequence(s) contained in the clones corresponding to at least one, two, three, four, five, ten, or more of the available material having the accession numbers identified in the sixth column of this Table (including for example, the actual sequence contained in an identified BAC clone).

[0031] Table 4 provides a key to the tissue/cell source identifier code disclosed in Table 1A, column 8. Column 1 provides the tissue/cell source identifier code disclosed in Table 1A, Column 8. Columns 2-5 provide a description of the tissue or cell source. Codes corresponding to diseased tissues are indicated in column 6 with the word “disease”. The use of the word “disease” in column 6 is non-limiting. The tissue or cell source may be specific (e.g. a neoplasm), or may be disease-associated (e.g., a tissue sample from a normal portion of a diseased organ). Furthermore, tissues and/or cells lacking the “disease” designation may still be derived from sources directly or indirectly involved in a disease state or disorder, and therefore may have a further utility in that disease state or disorder. In numerous cases where the tissue/cell source is a library, column 7 identifies the vector used to generate the library.

[0032] Table 5 provides a key to the OMIM reference identification numbers disclosed in Table 1A, column 10. OMIM reference identification numbers (Column 1) were derived from Online Mendelian Inheritance in Man (Online Mendelian Inheritance in Man, OMIM. McKusick-Nathans Institute for Genetic Medicine, Johns Hopkins University (Baltimore, Md.) and National Center for Biotechnology Information, National Library of Medicine, (Bethesda, MD) 2000. World Wide Web URL: http://www.ncbi.nlm.nih.gov/omim/). Column 2 provides diseases associated with the cytologic band disclosed in Table 1A, column 9, as determined using the Morbid Map database.

[0033] Table 6 summarizes ATCC Deposits, Deposit dates, and ATCC designation numbers of deposits made with the ATCC in connection with the present application.

[0034] Table 7 shows the cDNA libraries sequenced, and ATCC designation numbers and vector information relating to these cDNA libraries.

[0035] Table 8 provides a physical characterization of clones encompassed by the invention. The first column provides the unique clone identifier, “Clone ID NO:Z”, for certain cDNA clones of the invention, as described in Table 1A. The second column provides the size of the cDNA insert contained in the corresponding cDNA clone.

[0036] Definitions

[0037] The following definitions are provided to facilitate understanding of certain terms used throughout this specification.

[0038] In the present invention, “isolated” refers to material removed from its original environment (e.g., the natural environment if it is naturally occurring), and thus is altered “by the hand of man” from its natural state. For example, an isolated polynucleotide could be part of a vector or a composition of matter, or could be contained within a cell, and still be “isolated” because that vector, composition of matter, or particular cell is not the original environment of the polynucleotide. The term “isolated” does not refer to genomic or cDNA libraries, whole cell total or mRNA preparations, genomic DNA preparations (including those separated by electrophoresis and transferred onto blots), sheared whole cell genomic DNA preparations or other compositions where the art demonstrates no distinguishing features of the polynucleotide/sequences of the present invention.

[0039] As used herein, a “polynucleotide” refers to a molecule having a nucleic acid sequence encoding SEQ ID NO:Y or a fragment or variant thereof; a nucleic acid sequence contained in SEQ ID NO:X (as described in column 3 of Table 1A) or the complement thereof; a cDNA sequence contained in Clone ID NO:Z (as described in column 2 of Table 1A and contained within a library deposited with the ATCC); a nucleotide sequence encoding the polypeptide encoded by a nucleotide sequence in SEQ ID NO:B as defined in column 6 of Table 1B or a fragment or variant thereof; or a nucleotide coding sequence in SEQ ID NO:B as defined in column 6 of Table 1B or the complement thereof. For example, the polynucleotide can contain the nucleotide sequence of the full length cDNA sequence, including the 5′ and 3′ untranslated sequences, the coding region, as well as fragments, epitopes, domains, and variants of the nucleic acid sequence. Moreover, as used herein, a “polypeptide” refers to a molecule having an amino acid sequence encoded by a polynucleotide of the invention as broadly defined (obviously excluding poly-Phenylalanine or poly-Lysine peptide sequences which result from translation of a polyA tail of a sequence corresponding to a cDNA).

[0040] In the present invention, “SEQ ID NO:X” was often generated by overlapping sequences contained in multiple clones (contig analysis). A representative clone containing all or most of the sequence for SEQ ID NO:X is deposited at Human Genome Sciences, Inc. (HGS) in a catalogued and archived library. As shown, for example, in column 2 of Table 1A, each clone is identified by a cDNA Clone ID (identifier generally referred to herein as Clone ID NO:Z). Each Clone ID is unique to an individual clone and the Clone ID is all the information needed to retrieve a given clone from the HGS library. Furthermore, certain clones disclosed in this application have been deposited with the ATCC on Oct. 5, 2000, having the ATCC designation numbers PTA 2574 and PTA 2575; and on Jan. 5, 2001, having the depositor reference numbers TS-1, TS-2, AC-1, and AC-2. In addition to the individual cDNA clone deposits, most of the cDNA libraries from which the clones were derived were deposited at the American Type Culture Collection (hereinafter “ATCC”). Table 7 provides a list of the deposited cDNA libraries. One can use the Clone ID NO:Z to determine the library source by reference to Tables 6 and 7. Table 7 lists the deposited cDNA libraries by name and links each library to an ATCC Deposit. Library names contain four characters, for example, “HTWE.” The name of a cDNA clone (Clone ID) isolated from that library begins with the same four characters, for example “HTWEP07”. As mentioned below, Table 1A correlates the Clone ID names with SEQ ID NO:X. Thus, starting with an SEQ ID NO:X, one can use Tables 1, 6 and 7 to determine the corresponding Clone ID, which library it came from and which ATCC deposit the library is contained in. Furthermore, it is possible to retrieve a given cDNA clone from the source library by techniques known in the art and described elsewhere herein. The ATCC is located at 10801 University Boulevard, Manassas, Va. 20110-2209, USA. The ATCC deposits were made pursuant to the terms of the Budapest Treaty on the international recognition of the deposit of microorganisms for the purposes of patent procedure.

[0041] In specific embodiments, the polynucleotides of the invention are at least 15, at least 30, at least 50, at least 100, at least 125, at least 500, or at least 1000 continuous nucleotides but are less than or equal to 300 kb, 200 kb, 100 kb, 50 kb, 15 kb, 10 kb, 7.5 kb, 5 kb, 2.5 kb, 2.0 kb, or 1 kb, in length. In a further embodiment, polynucleotides of the invention comprise a portion of the coding sequences, as disclosed herein, but do not comprise all or a portion of any intron. In another embodiment, the polynucleotides comprising coding sequences do not contain coding sequences of a genomic flanking gene (i.e., 5′ or 3′ to the gene of interest in the genome). In other embodiments, the polynucleotides of the invention do not contain the coding sequence of more than 1000, 500, 250, 100, 50, 25, 20, 15, 10, 5, 4, 3, 2, or 1 genomic flanking gene(s).

[0042] A “polynucleotide” of the present invention also includes those polynucleotides capable of hybridizing, under stringent hybridization conditions, to sequences contained in SEQ ID NO:X, or the complement thereof (e.g., the complement of any one, two, three, four, or more of the polynucleotide fragments described herein), the polynucleotide sequence delineated in columns 8 and 9 of Table 2 or the complement thereof, and/or cDNA sequences contained in Clone ID NO:Z (e.g., the complement of any one, two, three, four, or more of the polynucleotide fragments, or the cDNA clone within the pool of cDNA clones deposited with the ATCC, described herein), and/or the polynucleotide sequence delineated in column 6 of Table 1B or the complement thereof. “Stringent hybridization conditions” refers to an overnight incubation at 42 degree C in a solution comprising 50% fonnamide, 5× SSC (750 mM NaCl, 75 mM trisodium citrate), 50 mM sodium phosphate (pH 7.6), 5× Denhardt's solution, 10% dextran sulfate, and 20 μg/ml denatured, sheared salmon sperm DNA, followed by washing the filters in 0.1× SSC at about 65 degree C.

[0043] Also contemplated are nucleic acid molecules that hybridize to the polynucleotides of the present invention at lower stringency hybridization conditions. Changes in the stringency of hybridization and signal detection are primarily accomplished through the manipulation of formamide concentration (lower percentages of formamide result in lowered stringency); salt conditions, or temperature. For example, lower stringency conditions include an overnight incubation at 37 degree C in a solution comprising 6× SSPE (20× SSPE=3M NaCl; 0.2M NaH₂PO₄; 0.02M EDTA, pH 7.4), 0.5% SDS, 30% formamide, 100 ug/ml salmon sperm blocking DNA; followed by washes at 50 degree C with 1× SSPE, 0.1% SDS. In addition, to achieve even lower stringency, washes performed following stringent hybridization can be done at higher salt concentrations (e.g. 5× SSC).

[0044] Note that variations in the above conditions may be accomplished through the inclusion and/or substitution of alternate blocking reagents used to suppress background in hybridization experiments. Typical blocking reagents include Denhardt's reagent, BLOTTO, heparin, denatured salmon sperm DNA, and commercially available proprietary formulations. The inclusion of specific blocking reagents may require modification of the hybridization conditions described above, due to problems with compatibility.

[0045] Of course, a polynucleotide which hybridizes only to polyA+ sequences (such as any 3′ terminal polyA+ tract of a cDNA shown in the sequence listing), or to a complementary stretch of T (or U) residues, would not be included in the definition of “polynucleotide,” since such a polynucleotide would hybridize to any nucleic acid molecule containing a poly (A) stretch or the complement thereof (e.g., practically any double-stranded cDNA clone generated using oligo dT as a primer).

[0046] The polynucleotide of the present invention can be composed of any polyribonucleotide or polydeoxribonucleotide, which may be unmodified RNA or DNA or modified RNA or DNA. For example, polynucleotides can be composed of single- and double-stranded DNA, DNA that is a mixture of single- and double-stranded regions, single- and double-stranded RNA, and RNA that is mixture of single- and double-stranded regions, hybrid molecules comprising DNA and RNA that may be single-stranded or, more typically, double-stranded or a mixture of single- and double-stranded regions. In addition, the polynucleotide can be composed of triple-stranded regions comprising RNA or DNA or both RNA and DNA. A polynucleotide may also contain one or more modified bases or DNA or RNA backbones modified for stability or for other reasons. “Modified” bases include, for example, tritylated bases and unusual bases such as inosine. A variety of modifications can be made to DNA and RNA; thus, “polynucleotide” embraces chemically, enzymatically, or metabolically modified forms.

[0047] The polypeptide of the present invention can be composed of amino acids joined to each other by peptide bonds or modified peptide bonds, i.e., peptide isosteres, and may contain amino acids other than the 20 gene-encoded amino acids. The polypeptides may be modified by either natural processes, such as posttranslational processing, or by chemical modification techniques which are well known in the art. Such modifications are well described in basic texts and in more detailed monographs, as well as in a voluminous research literature. Modifications can occur anywhere in a polypeptide, including the peptide backbone, the amino acid side-chains and the amino or carboxyl termini. It will be appreciated that the same type of modification may be present in the same or varying degrees at several sites in a given polypeptide. Also, a given polypeptide may contain many types of modifications. Polypeptides may be branched, for example, as a result of ubiquitination, and they may be cyclic, with or without branching. Cyclic, branched, and branched cyclic polypeptides may result from posttranslation natural processes or may be made by synthetic methods. Modifications include acetylation, acylation, ADP-ribosylation, amidation, covalent attachment of flavin, covalent attachment of a heme moiety, covalent attachment of a nucleotide or nucleotide derivative, covalent attachment of a lipid or lipid derivative, covalent attachment of phosphotidylinositol, cross-linking, cyclization, disulfide bond formation, demethylation, formation of covalent cross-links, formation of cysteine, formation of pyroglutamate, formylation, gamma-carboxylation, glycosylation, GPI anchor formation, hydroxylation, iodination, methylation, myristoylation, oxidation, pegylation, proteolytic processing, phosphorylation, prenylation, racemization, selenoylation, sulfation, transfer-RNA mediated addition of amino acids to proteins such as arginylation, and ubiquitination. (See, for instance, PROTEINS—STRUCTURE AND MOLECULAR PROPERTIES, 2nd Ed., T. E. Creighton, W. H. Freeman and Company, New York (1993); POSTTRANSLATIONAL COVALENT MODIFICATION OF PROTEINS, B. C. Johnson, Ed., Academic Press, New York, pgs. 1-12 (1983); Seifter et al., Meth. Enzymol. 182:626-646 (1990); Rattan et al., Ann. N.Y. Acad. Sci. 663:48-62 (1992)).

[0048] “SEQ ID NO:X” refers to a polynucleotide sequence described, for example, in Tables 1A or 2, while “SEQ ID NO:Y” refers to a polypeptide sequence described in column 6 of Table 1A. SEQ ID NO:X is identified by an integer specified in column 4 of Table 1A. The polypeptide sequence SEQ ID NO:Y is a translated open reading frame (ORF) encoded by polynucleotide SEQ ID NO:X. “Clone ID NO:Z” refers to a cDNA clone described in column 2 of Table 1A.

[0049] “A polypeptide having functional activity” refers to a polypeptide capable of displaying one or more known functional activities associated with a full-length (complete) protein. Such functional activities include, but are not limited to, biological activity, antigenicity [ability to bind (or compete with a polypeptide for binding) to an anti-polypeptide antibody], immunogenicity (ability to generate antibody which binds to a specific polypeptide of the invention), ability to form multimers with polypeptides of the invention, and ability to bind to a receptor or ligand for a polypeptide.

[0050] The polypeptides of the invention can be assayed for functional activity (e.g. biological activity) using or routinely modifying assays known in the art, as well as assays described herein. Specifically, one of skill in the art may routinely assay extracellular matrix polypeptides (including fragments and variants) of the invention for activity using assays as described in Examples 41, 43 and 62.

[0051] “A polypeptide having biological activity” refers to a polypeptide exhibiting activity similar to, but not necessarily identical to, an activity of a polypeptide of the present invention, including mature forms, as measured in a particular biological assay, with or without dose dependency. In the case where dose dependency does exist, it need not be identical to that of the polypeptide, but rather substantially similar to the dose-dependence in a given activity as compared to the polypeptide of the present invention (i.e., the candidate polypeptide will exhibit greater activity or not more than about 25-fold less and, preferably, not more than about tenfold less activity, and most preferably, not more than about three-fold less activity relative to the polypeptide of the present invention).

[0052] Table 1A summarizes some of the polynucleotides encompassed by the invention (including contig sequences (SEQ ID NO:X) and clones (Clone ID NO:Z) and further summarizes certain characteristics of these polynucleotides and the polypeptides encoded thereby.

TABLE 1A
Polynucleotides and Polypeptides of the Invention

| | | | | | AA | | Tissue Distribution | | |
|---|---|---|---|---|---|---|---|---|---|
| | | | | | SEQ | | Library code: count | | OMIM |
| Gene | Clone ID | Contig | SEQ ID | ORF | ID | | (see Table IV for | Cytologic | Disease |
| No: | NO: Z | ID: | NO: X | (From-To) | NO: Y | Predicted Epitopes | Library Codes) | Band | Reference(s): |
| 1 | HKAIP13 | 1027773 | 11 | 9-1877 | 276 | Asn-67 to Val-80, | AR051: 8, AR089: 5, | | |
| | | | | | | Arg-155 to Ile-161, | AR061: 2, AR050: 2, | | |
| | | | | | | Gln-229 to Pro-238, | AR054: 1 | | |
| | | | | | | Asp-251 to Asn-256, | | | |
| | | | | | | Arg-277 to Cys-283, | | | |
| | | | | | | Val-359 to Lys-383, | | | |
| | | | | | | Glu-444 to Tyr-449, | | | |
| | | | | | | Pro-483 to Asn-500, | | | |
| | | | | | | Asn-536 to Asp-548, | | | |
| | | | | | | Ala-552 to Ser-559, | | | |
| | | | | | | Tyr-597 to Gly-614, | | | |
| | | | | | | Pro-616 to Ser-623. | | | |
| 2 | HE2JT53 | 1027762 | 12 | 71-454 | 277 | Ser-18 to Pro-24, | AR050: 38, AR054: | | |
| | | | | | | Ser-38 to Ala-50, | 31, AR051: 5 | | |
| | | | | | | Ser-69 to Trp-80. | H0171: 2, H0624: 1, | | |
| | | | | | | | H0619: 1, H0581: 1, | | |
| | | | | | | | H0625: 1, L0637: 1 and | | |
| | | | | | | | H0660: 1. | | |
| 3 | HARMY82 | 930293 | 13 | 251-517 | 278 | Asp-1 to Glu-7, | AR089: 2, AR061: 2 | | |
| | | | | | | Tyr-27 to Trp-36. | H0329: 1, H0592: 1, | | |
| | | | | | | | H0486: 1, H0328: 1, | | |
| | | | | | | | L0809: 1, H0144: 1 and | | |
| | | | | | | | L0759: 1. | | |
| | | 973070 | 172 | 420-178 | 437 | | | | |
| 4 | HDPBG11 | 1216581 | 14 | 3-1001 | 279 | Val-19 to Ile-24, | AR089: 5, AR061: 3 | | |
| | | | | | | Pro-28 to Gly-36, | H0271: 32, S0132: 14, | | |
| | | | | | | Ser-98 to Asp-105, | S0046: 13, H0623: 13, | | |
| | | | | | | Leu-162 to Glu-167, | H0521: 13, H0416: 6, | | |
| | | | | | | Leu-189 to Asp-195, | H0634: 6, H0575: 5, | | |
| | | | | | | Tyr-206 to Phe-211, | H0522: 5, H0638: 4, | | |
| | | | | | | Ser-240 to Glu-245, | H0250: 4, H0641: 4, | | |
| | | | | | | Gly-289 to Asn-302, | H0556: 3, H0069: 3, | | |
| | | | | | | Pro-327 to Pro-333. | H0179: 3, H0551: 3, | | |
| | | | | | | | H0056: 3, S0052: 3, | | |
| | | | | | | | S0053: 3, L0581: 3, | | |
| | | | | | | | H0159: 2, H0657: 2, | | |
| | | | | | | | H0663: 2, S0278: 2, | | |
| | | | | | | | H0431: 2, H0457: 2, | | |
| | | | | | | | L0483: 2, H0649: 2, | | |
| | | | | | | | L0771: 2, L0662: 2, | | |
| | | | | | | | H0689: 2, H0518: 2, | | |
| | | | | | | | T0049: 1, H0656: 1, | | |
| | | | | | | | S0298: 1, H0662: 1, | | |
| | | | | | | | S0358: 1, S0222: 1, | | |
| | | | | | | | H392: 1, H0442: 1, | | |
| | | | | | | | H0587: 1, H0486: 1, | | |
| | | | | | | | T0109: 1, H0190: 1, | | |
| | | | | | | | H0635: 1, H0042: 1, | | |
| | | | | | | | H0530: 1, H0544: 1, | | |
| | | | | | | | H0545: 1, H0150: 1, | | |
| | | | | | | | S0051: 1, S0316: 1, | | |
| | | | | | | | T0023: 1, S0016: 1, | | |
| | | | | | | | H0560: 1, H0561: 1, | | |
| | | | | | | | H0509: 1, H0633: 1, | | |
| | | | | | | | S0344: 1, S0426: 1, | | |
| | | | | | | | L0763: 1, L0761: 1, | | |
| | | | | | | | L0667: 1, L0767: 1, | | |
| | | | | | | | L0649: 1, L0388: 1, | | |
| | | | | | | | L0775: 1, L0806: 1, | | |
| | | | | | | | L0656: 1, L0663: 1, | | |
| | | | | | | | L0665: 1, S0428: 1, | | |
| | | | | | | | S0216: 1, H0666: 1, | | |
| | | | | | | | H0672: 1, S0378: 1, | | |
| | | | | | | | H0528: 1, S0044: 1, | | |
| | | | | | | | H0187: 1, S0032: 1, | | |
| | | | | | | | L0749: 1, L0750: 1, | | |
| | | | | | | | L0759: 1, S0434: 1, | | |
| | | | | | | | L0593: 1 and H0422: 1. | | |
| | | 945456 | 173 | 3-734 | 438 | Arg-1 to Pro-10, | | | |
| | | | | | | Val-26 to Ile-31, | | | |
| | | | | | | Pro-35 to Gly-43, | | | |
| | | | | | | Ser-105 to Asp-112. | | | |
| 5 | HKAJ155 | 1132402 | 15 | 1-750 | 280 | Pro-1 to Trp-9, | AR051: 11, AR054: 9, | | |
| | | | | | | Pro-18 to Arg-29, | AR061: 2, AR089: 1 | | |
| | | | | | | Glu-33 to Cys-44, | 50250: 2, H0586: 1, | | |
| | | | | | | Gln-66 to Val-71, | H0053: 1, H0546: 1, | | |
| | | | | | | Glu-104 to Ser-111, | H0553: 1, H0551: 1, | | |
| | | | | | | Pro-121 to Ser-133, | H0494: 1 and L0757: 1. | | |
| | | | | | | Ala-148 to Trp-161, | | | |
| | | | | | | Ser-177 to Gly-187. | | | |
| | | 938506 | 174 | 3-464 | 439 | Pro-14 to Arg-25, | | | |
| | | | | | | Glu-29 to Cys-40, | | | |
| | | | | | | Gln-62 to Val-67, | | | |
| | | | | | | Glu-100 to Ser-107, | | | |
| | | | | | | Pro-117 to Ser-129. | | | |
| | | 949243 | 175 | 630-307 | 440 | Gln-2 to His-10. | | | |
| 6 | HMTBC77 | 1083572 | 16 | 655-239 | 281 | | AR089: 26, AR061: 7 | | |
| | | | | | | | H0656: 1 and H0518: | | |
| | | | | | | | 1. | | |
| | | 943279 | 176 | 131-406 | 441 | Asp-19 to Trp-28. | | | |
| 7 | HE8UA52 | 948509 | 17 | 1-615 | 282 | Pro-22 to Gly-32, | AR061: 6, AR089: 1 | | |
| | | | | | | Arg-52 to Gly-60, | L0752: 5, H0013: 2, | | |
| | | | | | | Ser-78 to Met-89, | L0780: 2, H0624: 1, | | |
| | | | | | | Ile-100 to Ser-106, | H0170: 1, H0645: 1, | | |
| | | | | | | Asp-130 to Leu-137, | H0318: 1, L0750: 1, | | |
| | | | | | | Tyr-146 to Ser-152. | L0779: 1 and L0777: 1. | | |
| 8 | HHBFK81 | 974909 | 18 | 1-423 | 283 | | AR050: 107, AR054: | | |
| | | | | | | | 73, AR051: 71, AR089: | | |
| | | | | | | | 11, AR061: 2 | | |
| | | | | | | | L0747: 12, L0748: 9, | | |
| | | | | | | | L0740: 8, L0754: 8, | | |
| | | | | | | | L0749: 8, L0731: 8, | | |
| | | | | | | | L0438: 6, L0752: 6, | | |
| | | | | | | | L0809: 5, L0439: 5, | | |
| | | | | | | | L0756: 5, H0624: 4, | | |
| | | | | | | | H0620: 4, L0803: 4, | | |
| | | | | | | | L0783: 4, L0666: 4, | | |
| | | | | | | | L0663: 4, L0755: 4, | | |
| | | | | | | | S0354: 3, H0013: 3, | | |
| | | | | | | | H0123: 3, H0553: 3, | | |
| | | | | | | | S0426: 3, L0766: 3, | | |
| | | | | | | | L0774: 3, L0805: 3, | | |
| | | | | | | | S0152: 3, L0750: 3, | | |
| | | | | | | | L0779: 3, L0777: 3, | | |
| | | | | | | | L0759: 3, S0026: 3, | | |
| | | | | | | | S0192: 3, S0194: 3, | | |
| | | | | | | | H0657: 2, S0358: 2, | | |
| | | | | | | | S0360: 2, H0393: 2, | | |
| | | | | | | | H0369: 2, H0575: 2, | | |
| | | | | | | | H0251: 2, H0050: 2, | | |
| | | | | | | | H0012: 2, H0373: 2, | | |
| | | | | | | | S0250: 2, H0090: 2, | | |
| | | | | | | | H0038: 2, L0770: 2, | | |
| | | | | | | | L0794: 2, L0804: 2, | | |
| | | | | | | | L0651: 2, L0659: 2, | | |
| | | | | | | | L0517: 2, L0665: 2, | | |
| | | | | | | | H0144: 2, S0126: 2, | | |
| | | | | | | | H0521: 2, S0146: 2, | | |
| | | | | | | | S3014: 2, L0745: 2, | | |
| | | | | | | | L0753: 2, L0757: 2, | | |
| | | | | | | | L0592: 2, L0608: 2, | | |
| | | | | | | | H0170: 1, H0171: 1, | | |
| | | | | | | | S0202: 1, T0002: 1, | | |
| | | | | | | | S0040: 1, S0212: 1, | | |
| | | | | | | | H0662: 1, S0420: 1, | | |
| | | | | | | | S0376: 1, T0008: 1, | | |
| | | | | | | | H0329: 1, H0619: 1, | | |
| | | | | | | | H0645: 1, H0411: 1, | | |
| | | | | | | | H0550: 1, H0592: 1, | | |
| | | | | | | | H0574: 1, H0486: 1, | | |
| | | | | | | | L0021: 1, H0036: 1, | | |
| | | | | | | | L0471: 1, H0024: 1, | | |
| | | | | | | | H0266: 1, H0188: 1, | | |
| | | | | | | | H0687: 1, S0003: 1, | | |
| | | | | | | | S0214: 1,H0615: 1, | | |
| | | | | | | | H0644: 1, H0674: 1, | | |
| | | | | | | | H0068: 1, H0163: 1, | | |
| | | | | | | | H0591: 1, H0551: 1, | | |
| | | | | | | | T0069: 1, S0438: 1, | | |
| | | | | | | | L0763: 1, L0772: 1, | | |
| | | | | | | | L0372: 1, L0764: 1, | | |
| | | | | | | | L0662: 1, L0767: 1, | | |
| | | | | | | | L0768: 1, L0650: 1, | | |
| | | | | | | | L0375: 1, L0784: 1, | | |
| | | | | | | | L0776: 1, L0655: 1, | | |
| | | | | | | | L0527: 1, L0384: 1, | | |
| | | | | | | | L0789: 1, L0790: 1, | | |
| | | | | | | | H0519: 1, H0435: 1, | | |
| | | | | | | | H0659: 1, H0658: 1, | | |
| | | | | | | | H0648: 1, S0328: 1, | | |
| | | | | | | | H0539: 1, H0522: 1, | | |
| | | | | | | | S0013: 1, H0696: 1, | | |
| | | | | | | | S0044: 1, S0406: 1, | | |
| | | | | | | | H0626: 1, S0037: 1, | | |
| | | | | | | | L0744: 1, L0751: 1, | | |
| | | | | | | | H0445: 1, L0589: 1, | | |
| | | | | | | | L0590: 1, S0242: 1, | | |
| | | | | | | | H0506: 1 and H0352: 1. | | |
| | | 974910 | 177 | 572-832 | 442 | Gly-35 to Gly-42, | | | |
| | | | | | | Pro-44 to Gly-50. | | | |
| | | 974913 | 178 | 158-3 | 443 | Asn-1 to Lys-6. | | | |
| 9 | HJACH50 | 1078153 | 19 | 2-445 | 284 | Phe-97 to Thr-105, | AR061: 8, AR089: 4 | | |
| | | | | | | Gln-117 to Thr-123, | S0374: 2, T0041: 1 and | | |
| | | | | | | Ala-132 to Asn-137. | L0761: 1. | | |
| | | 941741 | 179 | 2-445 | 444 | Phe-97 to Thr-105, | | | |
| | | | | | | Gln-117 to Thr-123, | | | |
| | | | | | | Ala-132 to Asn-137. | | | |
| | | 956219 | 180 | 468-202 | 445 | Ala-3 to Gly-12. | | | |
| 10 | HFIJC31 | 828148 | 20 | 72-518 | 285 | Glu-8 to Ile-20, | AR089: 2, AR061: 1 | | |
| | | | | | | Pro-22 to Pro-28, | L0804: 1, L0809: 1, | | |
| | | | | | | Glu-46 to Trp-58. | L0788: 1, H0593: 1, | | |
| | | | | | | | L0756: 1 and S0194: 1. | | |
| 11 | HNTMB90 | 910934 | 21 | 3-533 | 286 | Pro-18 to Pro-27, | AR051: 2, AR050: 1, | | |
| | | | | | | Leu-34 to Lys-39, | AR054: 1, AR061: 1, | | |
| | | | | | | Lys-90 to Pro-95. | AR089: 1 | | |
| | | | | | | | H0519: 2, H0046: 1, | | |
| | | | | | | | L0803: 1, H0520: 1 and | | |
| | | | | | | | L0758: 1. | | |
| 12 | HSDHB12 | 941973 | 22 | 3-638 | 287 | Met-49 to Tyr-56, | AR061: 8, AR089: 3 | | |
| | | | | | | Gln-91 to Val-101, | L0803: 4, L0794: 3, | | |
| | | | | | | Pro-172 to Gln-181, | L0747: 3, H0599: 2, | | |
| | | | | | | Ser-183 to Ile-197. | L0659: 2, L0789: 2, | | |
| | | | | | | | S0364: 1, L0804: 1, | | |
| | | | | | | | H0539: 1, L0720: 1 and | | |
| | | | | | | | S0031: 1. | | |
| | | 969094 | 181 | 3-278 | 446 | | | | |
| | | 969097 | 182 | 700-182 | 447 | Met-1 to Tyr-8, | | | |
| | | | | | | Gln-43 to Val-53, | | | |
| | | | | | | Pro-124 to Gln-133, | | | |
| | | | | | | Ser-135 to Ile-149. | | | |
| 13 | HARMO91 | 1161173 | 23 | 2-1477 | 288 | Val-58 to Glu-68, | AR051: 19,AR054: 8, | | |
| | | | | | | Asp-98 to Tyr-105, | AR050: 3, AR089: 2, | | |
| | | | | | | Ala-111 to Leu-119, | AR061: 1 | | |
| | | | | | | Glu-150 to Gly-155, | L0763: 2, L0754: 2, | | |
| | | | | | | Ala-163 to Leu-168, | H0592: 1, H0622: 1, | | |
| | | | | | | Asp-182 to Ser-189, | H0100: 1 and H0547: 1. | | |
| | | | | | | Ile-362 to Leu-371, | | | |
| | | | | | | Arg-403 to Ser-410, | | | |
| | | | | | | Pro-428 to Thr-434, | | | |
| | | | | | | Glu-458 to Gly-463. | | | |
| | | 947986 | 183 | 39-671 | 448 | Arg-9 to Arg-18, | | | |
| | | | | | | Val-76 to Glu-86, | | | |
| | | | | | | Asp-116 to Tyr-123, | | | |
| | | | | | | Ala-129 to Leu-137. | | | |
| 14 | HFPFB75 | 1152334 | 24 | 3-1136 | 289 | Asp-9 to Glu-19, ARO51: 14, AR050: 3, | | | |
| | | | | | | Ile-29 to Leu-40, | AR061: 3, AR089: 2, | | |
| | | | | | | Asp-62 to Asn-70, | AR054: 2 | | |
| | | | | | | Met-101 to Gln-108, | S0222: 1 | | |
| | | | | | | Asp-137 to Glu-156, | | | |
| | | | | | | Lys-168 to Gly-175, | | | |
| | | | | | | Ala-226 to Pro-233, | | | |
| | | | | | | Asp-286 to Asn-292, | | | |
| | | | | | | Asp-299 to Asp-305, | | | |
| | | | | | | Leu-323 to Trp-330. | | | |
| | | 947988 | 184 | 72-740 | 449 | Asp-18 to Glu-28, | | | |
| | | | | | | Ile-38 to Leu-49, | | | |
| | | | | | | Asp-71 to Asn-79, | | | |
| | | | | | | Met-110 to Gln-117, | | | |
| | | | | | | Asp-146 to Glu-165, | | | |
| | | | | | | Lys-177 to Gly-184. | | | |
| 15 | HFPGX08 | 1152339 | 25 | 3-566 | 290 | His-1 to Gly-9, | AR061: 4, AR089: 3 | | |
| | | | | | | Ser-14 to Lys-34, | L0439: 4, L0761: 3, | | |
| | | | | | | Glu-44 to Asp-50, | L0608: 2, S0222: 1, | | |
| | | | | | | Ala-79 to Pro-100, | H0309: 1, S0051: 1, | | |
| | | | | | | Leu-l36 to His-146, | S6028: 1, L0455: 1, | | |
| | | | | | | Glu-151 to His-165. | L0769: 1, L0662: 1, | | |
| | | | | | | | L0803: 1, L0438: 1, | | |
| | | | | | | | H0539: 1, S0037: 1, | | |
| | | | | | | | L0757: 1, L0589: 1 and | | |
| | | | | | | | L0366: 1. | | |
| | | 957896 | 185 | 1-1140 | 450 | | | | |
| 16 | HFXJD66 | 1197911 | 26 | 1-1461 | 291 | Ile-10 to Gln-16, | AR061: 4,AR089: 3 | | |
| | | | | | | Gln-42 to Ile-47, | L0777: 5, L0740: 2, | | |
| | | | | | | Thr-110 to Ile-119, | S0282: 1, H0646: 1, | | |
| | | | | | | Asn-141 to Ile-147, | S0146: 1, L0759: 1 and | | |
| | | | | | | Glu-184 to Glu-190, | H0506: 1. | | |
| | | | | | | Asp-210 to Glu-216, | | | |
| | | | | | | Glu-227 to Ser-232, | | | |
| | | | | | | Gly-289 to Cys-297, | | | |
| | | | | | | Leu-333 to Lys-338, | | | |
| | | | | | | Glu-344 to Arg-350, | | | |
| | | | | | | Asp-357 to Glu-367, | | | |
| | | | | | | Glu-382 to Thr-389, | | | |
| | | | | | | Ser-395 to Leu-401, | | | |
| | | | | | | Leu-418 to Thr-423, | | | |
| | | | | | | Ser-456 to Tyr-464. | | | |
| | | 937443 | 186 | 1-669 | 451 | Asp-15 to Phe-23, | | | |
| | | | | | | Glu-63 to Gln-68, | | | |
| | | | | | | Gln-94 to Ile-99, | | | |
| | | | | | | Thr-162 to Ile-171, | | | |
| | | | | | | Asn-193 to Ile-199. | | | |
| | | 955373 | 187 | 802-527 | 452 | | | | |
| 17 | HKABY22 | 1216582 | 27 | 1713-835 | 292 | Gly-6 to Gly-39, | AR089: 1, AR061: 1 | | |
| | | | | | | Ser-41 to Gly-50, | L0743: 6, H0545: 2, | | |
| | | | | | | Gln-52 to Gly-57, | H0676: 1, H0587: 1, | | |
| | | | | | | Pro-66 to Ser-74, | H0494: 1, L0640: 1, | | |
| | | | | | | Pro-81 to Gly-95, | L0769: 1, L0650: 1 and | | |
| | | | | | | Glu-165 to Glu-170, | L0758: 1. | | |
| | | | | | | Arg-195 to Gly-203, | | | |
| | | | | | | Pro-250 to Arg-262, | | | |
| | | | | | | Thr-266 to Gly-272, | | | |
| | | | | | | Glu-282 to Gln-289. | | | |
| | | 945467 | 188 | 8-463 | 453 | | | | |
| 18 | HLHCQ90 | 1128610 | 28 | 55-600 | 293 | Val-l29 to Phe-135, | AR061: 7, AR089: 4 | | |
| | | | | | | Gly-159 to Asn-170. | H0208: 1,H0619: 1, | | |
| | | | | | | | H0549: 1, H0024: 1 and | | |
| | | | | | | | H0688: 1. | | |
| | | 863222 | 189 | 124-411 | 454 | | | | |
| | | 895423 | 190 | 90-392 | 455 | Pro-13 to Ser-19, | | | |
| | | | | | | Lys-56 to Ser-61. | | | |
| 19 | HMKAJ50 | 1199288 | 29 | 3-1076 | 294 | Pro-16 to Asn-26, | AR050: 9, AR054: 7, | | |
| | | | | | | Asn-35 to Thr-41, | AR061: 2, AR051: 2, | | |
| | | | | | | Asp-84 to Gly-91, | AR089: 1 | | |
| | | | | | | Gln-108 to Thr-114, | L0439: 11, L0438: 2, | | |
| | | | | | | Thr-119 to Phe-124, | L0592: 2, L0594: 2, | | |
| | | | | | | Asp-140 to Gln-146, | S0001: 1, H0392: 1, | | |
| | | | | | | Asp-160 to Gln-166, | L0157: 1 and L0647: 1. | | |
| | | | | | | Lys-205 to Glu-211, | | | |
| | | | | | | Asn-228 to Gln-238, | | | |
| | | | | | | Glu-252 to Arg-257, | | | |
| | | | | | | Pro-268 to Val-280, | | | |
| | | | | | | Glu-286 to Asp-301, | | | |
| | | | | | | Gly-324 to Tyr-334, | | | |
| | | | | | | Arg-336 to Asn-343, | | | |
| | | | | | | Tyr-349 to Ser-358. | | | |
| | | 950532 | 191 | 3-593 | 456 | Pro-16 to Asn-26, | | | |
| | | | | | | Asn-35 to Thr-41, | | | |
| | | | | | | Asp-84 to Gly-91, | | | |
| | | | | | | Gln-108 to Thr-114, | | | |
| | | | | | | Thr-119 to Phe-124, | | | |
| | | | | | | Asp-140 to Gln-146, | | | |
| | | | | | | Asp-160 to Gln-166. | | | |
| 20 | HNGME19 | 1152253 | 30 | 3-1193 | 295 | Asp-7 to Gln-15, | AR061: 9, AR089: 4 | | |
| | | | | | | Gln-42 to Lys-50, | S0010: 4, L0471: 2, | | |
| | | | | | | Asp-59 to Ser-67, | L0748: 2, S0031: 2, | | |
| | | | | | | Asp-77 to Asp-89, | H0369: 1, H0263: 1, | | |
| | | | | | | Asp-113 to Gly-118, | N0006: 1, H0373: 1, | | |
| | | | | | | Leu-146 to Ser-153, | H0356: 1, H0644: 1, | | |
| | | | | | | Arg-233 to Glu-239, | S0428: 1 and L0759: 1. | | |
| | | | | | | Ile-243 to Gly-248, | | | |
| | | | | | | Asp-272 to Leu-279, | | | |
| | | | | | | Thr-292 to Ser-297, | | | |
| | | | | | | Ile-311 to Pro-316, | | | |
| | | | | | | Pro-322 to Glu-328, | | | |
| | | | | | | Lys-361 to Asn-371, | | | |
| | | | | | | Glu-388 to Asp-393. | | | |
| | | 940825 | 192 | 3-866 | 457 | Asp-5 to Gln-13, | | | |
| | | | | | | Gln-40 to Lys-48, | | | |
| | | | | | | Asp-57 to Ser-65, | | | |
| | | | | | | Asp-75 to Asp-87, | | | |
| | | | | | | Asp-111 to Gly-116, | | | |
| | | | | | | Leu-144 to Ser-151, | | | |
| | | | | | | Arg-231 to Glu-237, | | | |
| | | | | | | Ile-241 to Gly-246, | | | |
| | | | | | | Asp-270 to Leu-277. | | | |
| 21 | HOGEO44 | 1227219 | 31 | 31-1389 | 296 | His-1 to Gly-12, | AR050: 18, AR054: | | |
| | | | | | | Asn-41 to Ser-48, | 14, AR051: 12, AR061: | | |
| | | | | | | Asp-58 to Lys-65, | 0, AR089: 0 | | |
| | | | | | | Asp-92 to Pro-97, | L0456: 5, L0753: 5, | | |
| | | | | | | Val-101 to Thr-108, | H0586: 2, H0587: 2, | | |
| | | | | | | Glu-145 to Lys-150, | T0006: 2, L0455: 2, | | |
| | | | | | | Val-163 to Phe-170, | L0789: 2, L0439: 2, | | |
| | | | | | | Glu-192 to Asn-198, | L0745: 2, S0420: 1, | | |
| | | | | | | Thr-239 to Cys-244, | S0360: 1, H0609: 1, | | |
| | | | | | | Ala-252 to Ser-259, | H0046: 1, H0565: 1, | | |
| | | | | | | Phe-318 to Lys-326, | H0252: 1, S0036: 1, | | |
| | | | | | | Leu-334 to Ala-341, | S0386: 1, L0369: 1, | | |
| | | | | | | Leu-350 to Ala-357, | L0638: 1, L0800: 1, | | |
| | | | | | | Lys-364 to Glu-378. | L0773: 1, L0388: 1, | | |
| | | | | | | | L0806: 1, L0788: 1, | | |
| | | | | | | | L0663: 1, L0665: 1, | | |
| | | | | | | | L0438: 1, H0435: 1, | | |
| | | | | | | | H0658: 1 and L0746: 1. | | |
| | | 910733 | 193 | 31-1047 | 458 | His-1 to Gly-12, | | | |
| | | | | | | Asn-41 to Ser-48, | | | |
| | | | | | | Asp-58 to Lys-65, | | | |
| | | | | | | Asp-92 to Pro-97, | | | |
| | | | | | | Val-101 to Thr-108, | | | |
| | | | | | | Glu-145 to Lys-150, | | | |
| | | | | | | Val-163 to Phe-170, | | | |
| | | | | | | Glu-192 to Asn-198. | | | |
| 22 | HWDAE94 | 947194 | 32 | 1-537 | 297 | Ser-7 to Tyr-12, | AR089: 3, AR061: 1 | | |
| | | | | | | Ala-20 to Tyr-29, | L0743: 13, S0222: 10, | | |
| | | | | | | Asp-37 to Ser-45, | L0438: 9, H0052: 7, | | |
| | | | | | | Glu-74 to Gly-79, S0040: 5, H0009: 5, | | | |
| | | | | | | Arg-146 to Pro-151. | L0741: 5, L0748: 5, | | |
| | | | | | | | L0740: 5, L0747: 5, | | |
| | | | | | | | L0731: 5, H0620: 4, | | |
| | | | | | | | T0010: 4, S0250: 4, | | |
| | | | | | | | T0006: 4, S0038: 4, | | |
| | | | | | | | H0100: 4, L0745: 4, | | |
| | | | | | | | L0758: 4, S0276: 4, | | |
| | | | | | | | S6024: 3, S0001: 3, | | |
| | | | | | | | S0007: 3, L0717: 3, | | |
| | | | | | | | H0013: 3, S0049: 3, | | |
| | | | | | | | H0024: 3, H0594: 3, | | |
| | | | | | | | H0135: 3, L0662: 3, | | |
| | | | | | | | H0539: 3, H0550: 2, | | |
| | | | | | | | H0333: 2, H0172: 2, | | |
| | | | | | | | H0123: 2, S0051: 2, | | |
| | | | | | | | H0099: 2, H0188: 2, | | |
| | | | | | | | H0644: 2, H0617: 2, | | |
| | | | | | | | L0351: 2, L0369: 2, | | |
| | | | | | | | L0769: 2, L0638: 2, | | |
| | | | | | | | L0659: 2, L0789: 2, | | |
| | | | | | | | S0126: 2, H0682: 2, | | |
| | | | | | | | S0044: 2, S0028: 2, | | |
| | | | | | | | L0742: 2, L0439: 2, | | |
| | | | | | | | L0756: 2, L0752: 2, | | |
| | | | | | | | L0753: 2, L0759: 2, | | |
| | | | | | | | L0597: 2, L0605: 2, | | |
| | | | | | | | L0601: 2, L0600: 2, | | |
| | | | | | | | H0341: 1, S0029: 1, | | |
| | | | | | | | S0045: 1, H0619: 1, | | |
| | | | | | | | H0393: 1, S6026: 1, | | |
| | | | | | | | H0261: 1, H0549: 1, | | |
| | | | | | | | S6014: 1, H0392: 1, | | |
| | | | | | | | H0455: 1, H0600: 1, | | |
| | | | | | | | H0587: 1, H0485: 1, | | |
| | | | | | | | H0427: 1, S0280: 1, | | |
| | | | | | | | L0021: 1, T0082: 1, | | |
| | | | | | | | H0618: 1, S0010: 1, | | |
| | | | | | | | H0007: 1, H0085: 1, | | |
| | | | | | | | H0235: 1, H0327: 1, | | |
| | | | | | | | H0545: 1, H0081: 1, | | |
| | | | | | | | H0012: 1, H0082: 1, | | |
| | | | | | | | H0020: 1, H0051: 1, | | |
| | | | | | | | S6028: 1, H0286: 1, | | |
| | | | | | | | H0424: 1, H0418: 1, | | |
| | | | | | | | H0628: 1, H0124: 1, | | |
| | | | | | | | S0036: 1, H0040: 1, | | |
| | | | | | | | H0063: 1, H0116: 1, | | |
| | | | | | | | H0132: 1, H0652: 1, | | |
| | | | | | | | L0763: 1, L0646: 1, | | |
| | | | | | | | L0794: 1, L0766: 1, | | |
| | | | | | | | L0650: 1, L0774: 1, | | |
| | | | | | | | L0651: 1, L0653: 1, | | |
| | | | | | | | L0792: 1, L0666: 1, | | |
| | | | | | | | L0663: 1, L0665: 1, | | |
| | | | | | | | H0144: 1, S0380: 1, | | |
| | | | | | | | L0754: 1, L0755: 1, | | |
| | | | | | | | S0031: 1, L0608: 1, | | |
| | | | | | | | L0366: 1, H0653: 1 and | | |
| | | | | | | | H0352: 1. | | |
| | | 947195 | 194 | 2774-1857 | 459 | | | | |
| 23 | HWHGC57 | 1085498 | 33 2-631 | 298 | Arg-10 to Pro-20. | AR089: 8, AR061: 4 | | | |
| | | | | | | | H0586: 1 | | |
| | | 942388 | 195 | 2-499 | 460 | Arg-10 to Asp-22. | | | |
| 24 | HWHPE63 | 940445 | 34 | 3-635 | 299 | Pro-20 to Arg-26, | AR050: 10, AR054: 1, | | |
| | | | | | | Gln-31 to Thr-36, | AR051: 1, AR061: 1, | | |
| | | | | | | Leu-76 to Ala-82, | AR089: 1 | | |
| | | | | | | Asp-110 to Asn-116, | L0743: 6, H0545: 2, | | |
| | | | | | | Gln-135 to Gly-140, | H0587: 1, H0494: 1, | | |
| | | | | | | Arg-149 to Arg-154. | L0640: 1, L0769: 1, | | |
| | | | | | | | L0650: 1 and L0758: 1. | | |
| | | 943866 | 196 | 2-313 | 461 | Ala-1 to Thr-7, | | | |
| | | | | | | Ala-13 to Gln-23, | | | |
| | | | | | | Ser-32 to Gln-40, | | | |
| | | | | | | Pro-67 to Trp-77. | | | |
| | | 972108 | 197 | 520-56 | 462 | Pro-42 to Leu-49, | | | |
| | | | | | | Pro-76 to Gly-81, | | | |
| | | | | | | Arg-88 to Ala-97. | | | |
| 25 | HTEPC92 | 1129089 | 35 | 585-1337 | 300 | Gln-16 to Glu-25, | AR051: 23, AR054: | | |
| | | | | | | Ala-56 to Trp-66, | 10, AR050: 8, AR061: | | |
| | | | | | | Gln-68 to Tyr-74, | 2, AR089: 2 | | |
| | | | | | | Thr-85 to Gly-94, | H0616: 3, H0090: 1, | | |
| | | | | | | Arg-114 to Asp-121, | H0038: 1, L0804: 1 and | | |
| | | | | | | Gln-128 to Gly-133, | L0754: 1. | | |
| | | | | | | Trp-137 to Pro-143, | | | |
| | | | | | | Glu-151 to Asn-157, | | | |
| | | | | | | Pro-212 to Val-223. | | | |
| | | 947666 | 198 | 578-988 | 463 | Gln-16 to Glu-25, | | | |
| | | | | | | Ala-56 to Trp-66, | | | |
| | | | | | | Gln-68 to Tyr-74, | | | |
| | | | | | | Thr-85 to Gly-94, | | | |
| | | | | | | Arg-114 to Tyr-122, | | | |
| | | | | | | Ser-127 to Ala-132. | | | |
| 26 | HACAD35 | 949199 | 36 | 1473-916 | 301 | Leu-9 to Leu-18, | AR061: 2, AR089: 1 | | |
| | | | | | | Ala-49 to Gly-55, | L0637: 2, L0783: 2, | | |
| | | | | | | Gly-66 to Glu-74, | L0777: 2, S6022: 1, | | |
| | | | | | | Ala-95 to Gln-100. | H0392: 1, H0586: 1, | | |
| | | | | | | | H0050: 1, L0809: 1, | | |
| | | | | | | | L0759: 1 and S0192: 1. | | |
| 27 | HBXF123 | 945319 | 37 | 196-552 | 302 | Gly-6 to Pro-19, | AR051: 15, AR089: 3, | | |
| | | | | | | Arg-67 to Tyr-74, | AR061: 3, AR050: 0 | | |
| | | | | | | Thr-101 to Leu-117. | L0748: 3, L0752: 3, | | |
| | | | | | | | L0740: 2, L0731: 2, | | |
| | | | | | | | S0358: 1, | H0438: 1, | |
| | | | | | | | H0574: 1, | H0421: 1, | |
| | | | | | | | H0046: 1, | H0041: 1, | |
| | | | | | | | H0063: 1, | H0272: 1, | |
| | | | | | | | S0150: 1, | S0002: 1, | |
| | | | | | | | L0794: 1, | L0803: 1, | |
| | | | | | | | L0804: 1, | L0775: 1, | |
| | | | | | | | L0661: 1, | L0789: 1, | |
| | | | | | | | H0672: 1, | H0539: 1, | |
| | | | | | | | L0758: 1 and L0366: 1. | | |
| 28 | HDPMQ42 | 1152330 | 38 | 2-739 | 303 | Lys-22 to Ser-27, | AR061: 28, AR089: 9 | | |
| | | | | | | Ala-37 to Gly-50, | H0521: 10, H0522: 4, | | |
| | | | | | | Leu-84 to Lys-91, | H0580: 2, S0214: 2, | | |
| | | | | | | Cys-114 to Ser-124, | L0750: 2, H0486: 1, | | |
| | | | | | | Gln-137 to Asp-142, | L0021: 1, H0251: 1, | | |
| | | | | | | Asp-178 to Trp-187, | H0309: 1, H0263: 1, | | |
| | | | | | | Asp-189 to Phe-199, | H0271: 1, S0003: 1, | | |
| | | | | | | Pro-202 to Glu-210, | H0068: 1, H0090: 1, | | |
| | | | | | | Arg-218 to Trp-226. | S0144: 1, L0803: 1, | | |
| | | | | | | | L0804: 1, L0749: 1, | | |
| | | | | | | | L0777: 1 and L0759: 1. | | |
| | | 972069 | 199 | 1-729 | 464 | Lys-19 to Ser-24, | | | |
| | | | | | | Ala-34 to Gly-47, | | | |
| | | | | | | Leu-81 to Lys-88, | | | |
| | | | | | | Cys-111 to Ser-121, | | | |
| | | | | | | Gln-134 to Asp-139, | | | |
| | | | | | | Asp-175 to Trp-184, | | | |
| | | | | | | Asp-186 to Phe-196, | | | |
| | | | | | | Pro-199 to Glu-207, | | | |
| | | | | | | Arg-215 to Trp-223. | | | |
| 29 | HDPPU44 | 1151459 | 39 | 138-425 | 304 | Ser-44 to Trp-53. | AR089: 3, AR061: 1 | | |
| | | | | | | | L0755: 4, H0521: 1 | | |
| | | | | | | | and H0522: 1. | | |
| | | 951276 | 200 | 176-376 | 465 | | | | |
| 30 | HDPTQ81 | 1045003 | 40 | 635-66 | 305 | Gln-3 to His-11, | AR089: 6,AR061: 3 | | |
| | | | | | | Pro-24 to Trp-29, | H0521: 2, H0656: 1 | | |
| | | | | | | Ser-31 to His-46, | and H0555: 1. | | |
| | | | | | | His-66 to His-75, | | | |
| | | | | | | Thr-79 to Tyr-85, | | | |
| | | | | | | Ser-102 to Ala-107. | | | |
| | | 951249 | 201 | 3-284 | 466 | Lys-1 to Gly-10. | | | |
| 31 | HEQBH92 | 1128230 | 41 | 3-431 | 306 | | AR089: 3, AR061: 1 | | |
| | | | | | | | S0212: 1 and H0544: 1. | | |
| | | 839319 | 202 | 42-359 | 467 | Arg-44 to Gly-49. | | | |
| 32 | HLTEO24 | 1194106 | 42 | 1-795 | 307 | Leu-34 to Tyr-44, | AR061: 5, AR089: 2 | | |
| | | | | | | Leu-48 to Ser-54, | H0616: 3, H0619: 1, | | |
| | | | | | | Gln-91 to Glu-100, | H0457: 1, H0090: 1, | | |
| | | | | | | Ala-131 to Trp-141, | H0038: 1, L0804: 1 and | | |
| | | | | | | Gln-143 to Tyr-149, | L0754: 1. | | |
| | | | | | | Thr-160 to Gly-169, | | | |
| | | | | | | Arg-189 to Asp-196, | | | |
| | | | | | | Gln-203 to Gly-208, | | | |
| | | | | | | Trp-212 to Pro-218, | | | |
| | | | | | | Glu-226 to Asn-232. | | | |
| | | 937797 | 203 | 3-632 | 468 | Leu-31 to Tyr-41, | | | |
| | | | | | | Leu-45 to Ser-51, | | | |
| | | | | | | Gln-88 to Glu-97, | | | |
| | | | | | | Ala-128 to Trp-138, | | | |
| | | | | | | Gln-140 to Tyr-146. | | | |
| 33 | HOABR66 | 1181041 | 43 | 165-2021 | 308 | Arg-5 to Gly-15. | AR061: 7, AR089: 4 | | |
| | | | | | | S0250: 6, H0551: 3, | | | |
| | | | | | | S0420: 2, H0024: 2, | | | |
| | | | | | | H0124: 2, H0587: 1, | | | |
| | | | | | | L0021: 1, H0544: 1, | | | |
| | | | | | | H0086: 1, H0123: 1, | | | |
| | | | | | | H0266: 1, H0252: 1, | | | |
| | | | | | | H0135: 1, H0087: 1, | | | |
| | | | | | | H0100: 1, H0494: 1, | | | |
| | | | | | | L0770: 1, L0773: 1, | | | |
| | | | | | | L0809: 1, H0519: 1, | | | |
| | | | | | | S0390: 1, L0750: 1, | | | |
| | | | | | | S0011: 1 and H0543: 1. | | | |
| | | 944115 | 204 | 223-693 | 469 | | | | |
| 34 | HWADF26 | 1151531 | 44 | 3-611 | 309 | Ala-50 to Asp-58, | AR0SO: 78, AR054: | | |
| | | | | | | Asn-62 to Asp-73, | 61, AR051: 60, AR061: | | |
| | | | | | | Glu-89 to Cys-97, | 2, AR089: 1 | | |
| | | | | | | Asn-102 to Ser-110. | H0581: 2, S0114: 1 and | | |
| | | | | | | | L0362: 1. | | |
| | | 957347 | 205 | 1099-506 | 470 | Ala-45 to Asp-53, | | | |
| | | | | | | Asn-57 to Asp-68, | | | |
| | | | | | | Glu-84 to Cys-92, | | | |
| | | | | | | Asn-97 to Ser-105. | | | |
| 35 | HWAGT47 | 1198738 | 4583-628 | 310 | Arg-9 to Phe-15, | AR089: 2, AR061: 2 | | | |
| | | | | | | Asn-41 to Asp-52, | L0766: 6, H0543: 5, | | |
| | | | | | | Glu-68 to Cys-76, | H0254: 3, L0439: 3, | | |
| | | | | | | Asn-81 to Ser-89. | H0445: 3, H0542: 3, | | |
| | | | | | | | H0656: 2, S0358: 2, | | |
| | | | | | | | H0581: 2, L0387: 2, | | |
| | | | | | | | L0789: 2, L0749: 2, | | |
| | | | | | | | H0677: 2, H0265: 1, | | |
| | | | | | | | H0556: 1, S0114: 1, | | |
| | | | | | | | H0583: 1, H0657: 1, | | |
| | | | | | | | S0442: 1, H0370: 1, | | |
| | | | | | | | H0040: 1, H0538: 1, | | |
| | | | | | | | L0763: 1, L0761: 1, | | |
| | | | | | | | L0794: 1, L0804: 1, | | |
| | | | | | | | S0374: 1, H0134: 1, | | |
| | | | | | | | H0679: 1, L0777: 1, | | |
| | | | | | | | L0599: 1, L0362: 1, | | |
| | | | | | | | H0423: 1 and H0422: 1. | | |
| | | 939095 | 206 | 63-491 | 471 | Arg-9 to Phe-15, | | | |
| | | | | | | Asn-41 to Asp-52. | | | |
| 36 | HHFJH79 | 933308 | 46 | 2-832 | 311 | | AR061: 2, AR089: 2 | | |
| | | | | | | | H0424: 9, L0747: 7, | | |
| | | | | | | | H0618: 5, H0620: 5, | | |
| | | | | | | | L0809: 5, H0549: 4, | | |
| | | | | | | | H0087: 4, L0655: 4, | | |
| | | | | | | | L0750: 4, S0222: 3, | | |
| | | | | | | | H0253: 3, S0346: 3, | | |
| | | | | | | | H0150: 3, H0081: 3, | | |
| | | | | | | | H0083: 3, H0188: 3, | | |
| | | | | | | | H0428: 3, H0213: 3, | | |
| | | | | | | | L0774: 3, L0805: 3, | | |
| | | | | | | | L0749: 3, L0759: 3, | | |
| | | | | | | | L0005: 2, H0619: 2, | | |
| | | | | | | | S0278: 2, H0635: 2, | | |
| | | | | | | | S0049: 2, H0251: 2, | | |
| | | | | | | | H0546: 2, H0009: 2, | | |
| | | | | | | | H0012: 2, H0024: 2, | | |
| | | | | | | | H0617: 2, H0494: 2, | | |
| | | | | | | | L0769: 2, L0637: 2, | | |
| | | | | | | | L0772: 2, L0803: 2, | | |
| | | | | | | | L0518: 2, L0384: 2, | | |
| | | | | | | | L0665: 2, L0438: 2, | | |
| | | | | | | | H0547: 2, H0658: 2, | | |
| | | | | | | | S0152: 2, H0521: 2, | | |
| | | | | | | | L0439: 2, L0779: 2, | | |
| | | | | | | | L0758: 2, L0592: 2, | | |
| | | | | | | | L0599: 2, L0595: 2, | | |
| | | | | | | | H0543: 2, S0424: 2, | | |
| | | | | | | | H0352: 2, H0624: 1, | | |
| | | | | | | | H0686: 1, H0295: 1, | | |
| | | | | | | | S0114: 1, S0134: 1, | | |
| | | | | | | | H0341: 1, S0212: 1, | | |
| | | | | | | | H0254: 1, S0420: 1, | | |
| | | | | | | | S0354: 1, H0351: 1, | | |
| | | | | | | | H0550: 1, H0586: 1, | | |
| | | | | | | | H0333: 1, H0643: 1, | | |
| | | | | | | | L0623: 1, H0486: 1, | | |
| | | | | | | | T0039: 1, H0013: 1, | | |
| | | | | | | | T0082: 1, H0052: 1, | | |
| | | | | | | | H0597: 1, H0545: 1, | | |
| | | | | | | | H0178: 1, L0157: 1, | | |
| | | | | | | | H0594: 1, H0028: 1, | | |
| | | | | | | | H0604: 1, H0032: 1, | | |
| | | | | | | | H0674: 1, S0364: 1, | | |
| | | | | | | | H0361: 1, H0135: 1, | | |
| | | | | | | | H0551: 1, H0264: 1, | | |
| | | | | | | | H0100: 1, T0042: 1, | | |
| | | | | | | | H0561: 1, L0369: 1, | | |
| | | | | | | | L0770: 1, L0639: 1, | | |
| | | | | | | | L0800: 1,L0662: 1, | | |
| | | | | | | | L0768: 1, L0364: 1, | | |
| | | | | | | | L0794: 1, L0804: 1, | | |
| | | | | | | | L0375: 1, L0378: 1, | | |
| | | | | | | | L0653: 1, L0776: 1, | | |
| | | | | | | | L0659: 1, L0365: 1, | | |
| | | | | | | | L0542: 1, L0783: 1, | | |
| | | | | | | | L0789: 1, L0790: 1, | | |
| | | | | | | | L0791: 1, L0666: 1, | | |
| | | | | | | | S0052: 1, T0068: 1, | | |
| | | | | | | | H0689: 1, H0690: 1, | | |
| | | | | | | | H0684: 1, H0670: 1, | | |
| | | | | | | | H0660: 1, H0648: 1, | | |
| | | | | | | | H0672: 1, S0044: 1, | | |
| | | | | | | | L0741: 1, L0743: 1, | | |
| | | | | | | | L0748: 1, L0751: 1, | | |
| | | | | | | | L0756: 1, L0752: 1, | | |
| | | | | | | | L0731: 1, L0757: 1, | | |
| | | | | | | | H0665: 1, L0096: 1 and | | |
| | | | | | | | S0194: 1. | | |
| 37 | HPJEV71 | 949153 | 47 | 269-2029 | 312 | Ser-5 to Gly-20. | AR089: 7, AR061: 6 | | |
| | | | | | | | H0521: 2, H0039: 1, | | |
| | | | | | | | H0641: 1, H0529: 1, | | |
| | | | | | | | L0654: 1, H0701: 1, | | |
| | | | | | | | H0518: 1, S0152: 1 and | | |
| | | | | | | | H0522: 1. | | |
| 38 | HRDAF83 | 997244 | 48 | 3-2123 | 313 | Ala-1 to Asp-9, | AR051: 23, AR050: | | |
| | | | | | | Phe-39 to Arg-47, | 20, AR054: 11, AR061: | | |
| | | | | | | Leu-78 to Asp-88, | 9, AR089: 5 | | |
| | | | | | | Val-112 to Asp-117, | S0250: 8, S0126: 8, | | |
| | | | | | | Thr-127 to Asn-132, | H0251: 3, H0545: 2, | | |
| | | | | | | Glu-144 to Thr-151, | H0252: 2, L0794: 2, | | |
| | | | | | | Val-158 to Ser-165, | L0565: 2, L0744: 2, | | |
| | | | | | | Asn-233 to Val-238, | L0757: 2, S0040: 1, | | |
| | | | | | | Glu-249 to Arg-257, | S0212: 1, S0418: 1, | | |
| | | | | | | Gly-288 to Leu-296, | S0360: 1,H0549: 1, | | |
| | | | | | | Gln-302 to Thr-309, | H0024: 1, L0053: 1, | | |
| | | | | | | Tyr-319 to Ile-324, | H0124: 1, S0208: 1, | | |
| | | | | | | Gly-370 to Thr-376, | S0011: 1 and S0276: 1. | | |
| | | | | | | Glu-424 to Lys-435, | | | |
| | | | | | | Glu-524 to Lys-530, | | | |
| | | | | | | Gly-545 to Phe-558, | | | |
| | | | | | | Asp-567 to Tyr-573, | | | |
| | | | | | | Thr-603 to Thr-609, | | | |
| | | | | | | His-672 to Asp-681. | | | |
| | | 957143 | 207 | 36-344 | 472 | Asn-66 to Val-71, | | | |
| | | | | | | Glu-82 to Thr-91. | | | |
| | | 963999 | 208 | 230-3 | 473 | Ser-42 to Arg-50, | | | |
| | | | | | | Gln-66 to Val-73. | | | |
| 39 | HUFCN91 | 1193585 | 49 | 26-1030 | 314 | Cys-7 to Ala-24, | AR089: 2,AR061: 2 | | |
| | | | | | | Asn-30 to Asn-42, | H0441: 5, H0134: 3, | | |
| | | | | | | Ser-80 to Ser-89, | H0050: 2, S0038: 2, | | |
| | | | | | | Leu-130 to Arg-135, | L0777: 2, H0583: 1, | | |
| | | | | | | Leu-142 to Ser-150, | H0650: 1, H0656: 1, | | |
| | | | | | | Ser-252 to Ala-257, | H0255: 1, H0125: 1, | | |
| | | | | | | Asp-269 to Asn-276, | H0192: 1, H0676: 1, | | |
| | | | | | | Gln-303 to Ala-313, | H0438: 1, S0049: 1, | | |
| | | | | | | Thr-315 to Pro-327. | H0038: 1, H0529: 1, | | |
| | | | | | | | H0690: 1, L0439: 1, | | |
| | | | | | | | H0677: 1 and H0506: 1. | | |
| | | 949137 | 209 | 25-924 | 474 | Cys-7 to Ala-24, | | | |
| | | | | | | Asn-30 to Asn-42, | | | |
| | | | | | | Ser-80 to Ser-89, | | | |
| | | | | | | Leu-130 to Arg-135, | | | |
| | | | | | | Leu-142 to Ser-150, | | | |
| | | | | | | Tyr-161 to Arg-166. | | | |
| 40 | HILBH66 | 948844 | 50 | 1-438 | 315 | Gly-3 to Trp-12, | AR061: 19, AR089: 11 | 17p13 | 138190, |
| | | | | | | Ser-35 to Cys-40, | L0794: 10, L0803: 6, | | 254210, |
| | | | | | | Ala-72 to Thr-77, | L0777: 6, L0758: 5, | | 271900, |
| | | | | | | Phe-118 to Gln-124, | L0747: 4, L0770: 3, | | 600179, |
| | | | | | | Asn-140 to Asn-146. | L0809: 3, L0666: 3, | | 600977, |
| | | | | | | | L0759: 3, L0763: 2, | | 601202, |
| | | | | | | | L0804: 2, L0783: 2, | | 601777 |
| | | | | | | | H0659: 2, L0749: 2, | | |
| | | | | | | | L0750: 2, L0779: 2, | | |
| | | | | | | | T0002; 1, H0686: 1, | | |
| | | | | | | | S0116: 1, H0483: 1, | | |
| | | | | | | | H0486: 1, L0471: 1, | | |
| | | | | | | | S0388: 1, H0083: 1, | | |
| | | | | | | | H0535: 1, H0646: 1, | | |
| | | | | | | | S0002: 1, L0761: 1, | | |
| | | | | | | | L0800: 1, L0764: 1, | | |
| | | | | | | | L0766: 1, L0775: 1, | | |
| | | | | | | | L0655: 1, L0518: 1, | | |
| | | | | | | | L0787: 1, S0374: 1, | | |
| | | | | | | | H0651: 1, L0748: 1, | | |
| | | | | | | | L0731: 1 and 50242: 1. | | |
| 41 | HLWAW86 | 785395 | 51 | 1-273 | 316 | Lys-11 to Arg-23, | H0553: 1 and L0759: | | |
| | | | | | | Cys-25 to Cys-31, | 1. | | |
| | | | | | | Pro-33 to Tyr-38, | | | |
| | | | | | | Arg-46 to Ile-60. | | | |
| | | 941397 | 210 | 115-462 | 475 | Leu-17 to Gln-23, | | | |
| | | | | | | Gln-38 to Phe-44, | | | |
| | | | | | | Gln-65 to Gln-72, | | | |
| | | | | | | Thr-80 to Tyr-86. | | | |
| 42 | HAHEF22 | 910996 | 52 | 3-839 | 317 | Lys-51 to Gly-58, | AR089: 16, AR061: 8 | | |
| | | | | | | Asp-67 to Glu-73. | L0803: 4, L0794: 3, | | |
| | | | | | | | L0747: 3, H0599: 2, | | |
| | | | | | | | L0659: 2, L0789: 2, | | |
| | | | | | | | S0364: 1, L0804: 1, | | |
| | | | | | | | H0539: 1, L0720: 1 and | | |
| | | | | | | | S0031: 1. | | |
| 43 | HBGQN46 | 945370 | 53 | 99-683 | 318 | Arg-25 to Ala-32, | AR089: 1, AR061: 0 | | |
| | | | | | | Ala-54 to Tyr-59. | H0617: 2, L0794: 2, | | |
| | | | | | | | L0766: 2, L0806: 2, | | |
| | | | | | | | L0777: 2, H0587: 1, | | |
| | | | | | | | L0767: 1, L0375: 1, | | |
| | | | | | | | L0790: 1, L0792: 1, | | |
| | | | | | | | L0743: 1, L0779: 1 and | | |
| | | | | | | | L0780: 1. | | |
| 44 | HCEOR02 | 921110 | 54 | 26-559 | 319 | Glu-1 to Glu-13. | AR061: 13, AR089: 6 | | |
| | | | | | | | H0052: 2, L0769: 2, | | |
| | | | | | | | H0556: 1, S0282: 1, | | |
| | | | | | | | T0082: 1 and L0790: 1. | | |
| 45 | HCYBK19 | 925494 | 55 | 2-1348 | 320 | Glu-4 to Gly-19, | AR089: 1, AR061: 0 | | |
| | | | | | | Ser-32 to Ser-39, | L0794: 18, L0770: 10, | | |
| | | | | | | Asp-106 to Asp-114, | L0779: 9, L0438: 8, | | |
| | | | | | | Met-145 to Arg-152, | L0754: 7, H0052: 6, | | |
| | | | | | | Asn-161 to Pro-177, | H0553: 6, L0803; 6, | | |
| | | | | | | Ala-210 to Gly-216, | L0747: 6, S0222: 4, | | |
| | | | | | | Tyr-260 to Tyr-270, | H0013: 4, S0010: 4, | | |
| | | | | | | Ser-282 to His-290, | L0769: 4, L0659: 4, | | |
| | | | | | | Thr-307 to Tyr-323, | L0809: 4, L0439: 4, | | |
| | | | | | | Cys-369 to Lys-382, | L0752: 4, L0758: 4, | | |
| | | | | | | Asn-433 to Lys-441. | S6016: 3, H0244: 3, | | |
| | | | | | | | H0144: 3, S0126: 3, | | |
| | | | | | | | L0599: 3, S0046: 2, | | |
| | | | | | | | L0157: 2, H0032: 2, | | |
| | | | | | | | H0169: 2, S0036: 2, | | |
| | | | | | | | H0038: 2, H0616: 2, | | |
| | | | | | | | L0763: 2, L0761: 2, | | |
| | | | | | | | L0766: 2, L0804: 2, | | |
| | | | | | | | L0650: 2, L0775: 2, | | |
| | | | | | | | L0805: 2, L0792: 2, | | |
| | | | | | | | L0665: 2, H0520: 2, | | |
| | | | | | | | H0436: 2, L0731: 2, | | |
| | | | | | | | L0596: 2, L0592: 2, | | |
| | | | | | | | L0581: 2, L0366: 2, | | |
| | | | | | | | H0423: 2, L0393: 1, | | |
| | | | | | | | H0656: 1, L0808: 1, | | |
| | | | | | | | S0282: 1, H0662: 1, | | |
| | | | | | | | S0376: 1, S0132: 1, | | |
| | | | | | | | H0393: 1, H0411: 1, | | |
| | | | | | | | H0369: 1, H0550: 1, | | |
| | | | | | | | H0441: 1, H0333: 1, | | |
| | | | | | | | T0114: 1, H0156: 1, | | |
| | | | | | | | L0021: 1, H0085: 1, | | |
| | | | | | | | H0050: 1, H0014: 1, | | |
| | | | | | | | H0020: 1, H0051: 1, | | |
| | | | | | | | S6028: 1, H0644: 1, | | |
| | | | | | | | S0364: 1, H0124: 1, | | |
| | | | | | | | H0068: 1, H0135: 1, | | |
| | | | | | | | H0591: 1, L0564: 1, | | |
| | | | | | | | H0342: 1, H0633: 1, | | |
| | | | | | | | L0640: 1, L0638: 1, | | |
| | | | | | | | L0764: 1, L0648: 1, | | |
| | | | | | | | L0662: 1, L0768: 1, | | |
| | | | | | | | L0649: 1, L0774: 1, | | |
| | | | | | | | L0636: 1, L0789: 1, | | |
| | | | | | | | L0666: 1, L0663: 1, | | |
| | | | | | | | L0352: 1, H0547: 1, | | |
| | | | | | | | H0689: 1, H0690: 1, | | |
| | | | | | | | H0539: 1, H0555: 1, | | |
| | | | | | | | S0028: 1, L0742: 1, | | |
| | | | | | | | L0748: 1, L0745: 1, | | |
| | | | | | | | L0750: 1, L0756: 1, | | |
| | | | | | | | L0777: 1, L0780: 1, | | |
| | | | | | | | L0757: 1, L0759: 1, | | |
| | | | | | | | S0308: 1, L0588: 1, | | |
| | | | | | | | S0106: 1, S0026: 1, | | |
| | | | | | | | H0667: 1, S0276: 1, | | |
| | | | | | | | H0543: 1 and H0677: 1. | | |
| 46 | HEMCL65 | 910900 | 56 | 3-368 | 321 | Val-7 to Arg-13. | AR054: 8, AR051: 3, | | |
| | | | | | | | AR061: 2, AR089: 1, | | |
| | | | | | | | AR050: 0 | | |
| | | | | | | | S0046: 5, L0747: 4, | | |
| | | | | | | | H0575: 3, H0266: 3, | | |
| | | | | | | | L0741: 3, L0748: 3, | | |
| | | | | | | | L0750: 3, S0045: 2, | | |
| | | | | | | | H0150: 2, H0012: 2, | | |
| | | | | | | | H0039: 2, H0622: 2, | | |
| | | | | | | | L0751: 2, L0749: 2, | | |
| | | | | | | | L0780: 2, H0445: 2, | | |
| | | | | | | | L0605: 2, L0599: 2, | | |
| | | | | | | | H0171: 1, T0049: 1, | | |
| | | | | | | | H0261: 1, H0587: 1, | | |
| | | | | | | | L0021: 1, H0599: 1, | | |
| | | | | | | | H0253: 1, T0048: 1, | | |
| | | | | | | | H0024: 1, S0051: 1, | | |
| | | | | | | | L0483: 1, H0644: 1, | | |
| | | | | | | | H0268: 1, T0004: 1, | | |
| | | | | | | | H0647: 1, L0771: 1, | | |
| | | | | | | | L0662: 1, L0775: 1, | | |
| | | | | | | | L0512: 1, L0659: 1, | | |
| | | | | | | | L0790: 1, S3012: 1, | | |
| | | | | | | | S0028: 1, L0743: 1, | | |
| | | | | | | | H0444: 1, L0588: 1, | | |
| | | | | | | | L0603: 1 and H0506: 1. | | |
| 47 | HHFGP83 | 828162 | 57 | 2-304 | 322 | Gly-1 to Pro-22, | AR089: 12, AR061: 9 | | |
| | | | | | | Glu-24 to Thr-30. | L0731: 9, L0665: 6, | | |
| | | | | | | | H0024: 4, L0745: 4, | | |
| | | | | | | | L0747: 4, L0662: 3, | | |
| | | | | | | | L0794: 3, H0550: 2, | | |
| | | | | | | | H0081: 2, H0012: 2, | | |
| | | | | | | | S0022: 2, H0100: 2, | | |
| | | | | | | | L0769: 2, L0764: 2, | | |
| | | | | | | | L0659: 2, H0520: 2, | | |
| | | | | | | | L0777: 2, L0759: 2, | | |
| | | | | | | | H0685: 1, S0040: 1, | | |
| | | | | | | | S0354: 1, H0351: 1, | | |
| | | | | | | | H0392: 1, H0586: 1, | | |
| | | | | | | | L0021: 1, H0253: 1, | | |
| | | | | | | | L0157: 1, H0123: 1, | | |
| | | | | | | | H0050: 1, L0471: 1, | | |
| | | | | | | | H0328: 1, H0615: 1, | | |
| | | | | | | | H0063: 1, L0598: 1, | | |
| | | | | | | | L0770: 1, L0638: 1, | | |
| | | | | | | | L0521: 1, L0768: 1, | | |
| | | | | | | | L0776: 1, L0629: 1, | | |
| | | | | | | | L0657: 1, L0783: 1, | | |
| | | | | | | | L0809: 1, L0666: 1, | | |
| | | | | | | | L0663: 1, S0148: 1, | | |
| | | | | | | | H0670: 1, H0134: 1 and | | |
| | | | | | | | L0779: 1. | | |
| 48 | HMKCH92 | 910936 | 58 | 78-704 | 323 | Pro-32 to Glu-37, | AR089: 1, AR061: 1 | 3p26-p25 | 154705, |
| | | | | | | Gly-56 to Ser-61, | L0439: 4, H0392: 1 | | 193300, |
| | | | | | | Gly-144 to Arg-149, | and L0749: 1. | | 193300, |
| | | | | | | Glu-161 to Gly-168, | | | 227646, |
| | | | | | | Thr-182 to Lys-187. | | | 253260, |
| | | | | | | | | | 278720, |
| | | | | | | | | | 601154, |
| | | | | | | | | | 601253, |
| | | | | | | | | | 602011 |
| 49 | HMSKF13 | 708207 | 59 | 2-400 324 | Arg-1 to Leu-7. | S0002: 1, H0134: 1 and | | | |
| | | | | | | | L0596: 1. | | |
| 50 | HMTAV95 | 614936 | 60 | 3-281 | 325 | Asp-1 to Ile-6, | AR089: 0, AR061: 0 | | |
| | | | | | | Trp-13 to Glu-21, | H0518: 2 | | |
| | | | | | | Met-27 to Lys-34, | | | |
| | | | | | | Ala-50 to Thr-56. | | | |
| 51 | HRODF07 | 952426 | 61 | 31-195 | 326 | AR061: 5, AR089: 4 | | | |
| | | | | | | | S0328: 7, S0330: 7, | | |
| | | | | | | | L0648: 6, L0549: 5, | | |
| | | | | | | | H0329: 1, H0039: 1, | | |
| | | | | | | | H0598: 1, S0352: 1, | | |
| | | | | | | | L0551: 1, S0432: 1 and | | |
| | | | | | | | L0755: 1. | | |
| 52 | HAGAE60 | 940223 | 62 | 2-556 | 327 | Val-7 to Thr-16, | AR061: 4, AR089: 2 | | |
| | | | | | | Asp-26 to Gln-32, | S0010: 4, L0471: 2, | | |
| | | | | | | Ser-105 to Ser-114. | L0748: 2, L0759: 2, | | |
| | | | | | | | S0031: 2, H0369: 1, | | |
| | | | | | | | H0263: 1, N0006: 1, | | |
| | | | | | | | H0373: 1, H0356: 1, | | |
| | | | | | | | H0644: 1, S0428: 1 and | | |
| | | | | | | | L0438: 1. | | |
| 53 | HCEON04 | 1154308 | 63 | 1075-2247 | 328 | Thr-1 to His-8, | AR089: 1, AR061: 0 | | |
| | | | | | | Thr-42 to Asp-62, | H0052: 7, S0046: 1, | | |
| | | | | | | Glu-98 to Phe-105. | H0645: 1, L0717: 1, | | |
| | | | | | | | H0549: 1, H0587: 1, | | |
| | | | | | | | H0485: 1, H0156: 1, | | |
| | | | | | | | L0032: 1, H0012: 1, | | |
| | | | | | | | H0620: 1, H0014: 1, | | |
| | | | | | | | S0051: 1, T0010: 1, | | |
| | | | | | | | H0375: 1, H0416: 1, | | |
| | | | | | | | H0553: 1, S0036: 1, | | |
| | | | | | | | H0494: 1, L0766: 1, | | |
| | | | | | | | L0378: 1, L0666: 1, | | |
| | | | | | | | H0702: 1, L0438: 1, | | |
| | | | | | | | H0547: 1, H0435: 1, | | |
| | | | | | | | H0660: 1, H0555: 1, | | |
| | | | | | | | L0611: 1, L0748: 1 and | | |
| | | | | | | | H0506: 1. | | |
| | | 857817 | 211 | 3-875 | 476 | | | | |
| 54 | HE2PC86 | 1082523 | 64 | 1-453 | 329 | Thr-13 to Gly-18, | AR061: 6,AR089: 3 | | |
| | | | | | | Pro-42 to Trp-47, | H0171: 1, H0318: 1 | | |
| | | | | | | Asn-55 to Thr-63, | and H0264: 1. | | |
| | | | | | | Glu-71 to Ser-79, | | | |
| | | | | | | Asp-90 to Val-97. | | | |
| | | 910696 | 212 | 3-260 | 477 | Thr-12 to Gly-17, | | | |
| | | | | | | Pro-41 to Trp-46, | | | |
| | | | | | | Asn-54 to Thr-62, | | | |
| | | | | | | Glu-70 to Val-79, | | | |
| | | | | | | Pro-81 to Gln-86. | | | |
| 55 | HE8BN82 | 1222273 | 65 | 1364-894 | 330 | Gly-41 to Glu-53, | AR089: 1, AR061: 1 | | |
| | | | | | | Glu-88 to Lys-107, | L0747: 6, H0046: 5, | | |
| | | | | | | Asn-146 to Asp-157. | L0749: 5, L0777: 5, | | |
| | | | | | | | L0752: 4, L0438: 3, | | |
| | | | | | | | L0731: 3, S0360: 2, | | |
| | | | | | | | H0031: 2, H0144: 2, | | |
| | | | | | | | L0745: 2, L0779: 2, | | |
| | | | | | | | L0758: 2, L0759: 2, | | |
| | | | | | | | H0445: 2, L0599: 2, | | |
| | | | | | | | S0196: 2, H0170: 1, | | |
| | | | | | | | H0171: 1, H0381: 1, | | |
| | | | | | | | S0116: 1, H0638: 1, | | |
| | | | | | | | S0007: 1, L0717: 1, | | |
| | | | | | | | H0013: 1, S0280: 1, | | |
| | | | | | | | H0036: 1, S0010: 1, | | |
| | | | | | | | H0318: 1, H0052: 1, | | |
| | | | | | | | H0597: 1, L0471: 1, | | |
| | | | | | | | H0012: 1, H0024: 1, | | |
| | | | | | | | S0051: 1, T0010: 1, | | |
| | | | | | | | H0375: 1, S0214: 1, | | |
| | | | | | | | H0328: 1, H0039: 1, | | |
| | | | | | | | H0622: 1, L0142: 1, | | |
| | | | | | | | L0143: 1, H0163: 1, | | |
| | | | | | | | H0090: 1, H0591: 1, | | |
| | | | | | | | H0038: 1, H0264: 1, | | |
| | | | | | | | L0770: 1, L0769: 1, | | |
| | | | | | | | L0638: 1, L0639: 1, | | |
| | | | | | | | L0646: 1, L0764: 1, | | |
| | | | | | | | L0771: 1, L0768: 1, | | |
| | | | | | | | L0794: 1, L0776: 1, | | |
| | | | | | | | L0655: 1, L0606: 1, | | |
| | | | | | | | L0809: 1, L0666: 1, | | |
| | | | | | | | H0670: 1, H0648: 1, | | |
| | | | | | | | H0521: 1, H0555: 1, | | |
| | | | | | | | L0743: 1, L0757: 1, | | |
| | | | | | | | H0595: 1 and H0506: 1. | | |
| | | 525050 | 213 | 2-301 | 478 | Val-21 to Asp-28, | | | |
| | | | | | | Glu-37 to Asn-42, | | | |
| | | | | | | Leu-68 to Glu-75. | | | |
| 56 | HFXAT30 | 1081795 | 66 | 2-658 | 331 | Glu-1 to Glu-6, | AR061: 5, AR089: 5 | | |
| | | | | | | Asn-38 to Tyr-49, | S0001: 1 | | |
| | | | | | | Ser-83 to Arg-89. | | | |
| | | 951336 | 214 | 2-334 | 479 | Glu-1 to Glu-6, | | | |
| | | | | | | Asn-38 to Tyr-49, | | | |
| | | | | | | Ser-83 to Arg-89. | | | |
| 57 | HGBAE53 | 1211778 | 67 | 92-487 | 332 | Gly-12 to Lys-23, | AR061: 673,AR089: | | |
| | | | | | | Glu-34 to Glu-53, | 361 | | |
| | | | | | | Val-74 to Lys-84, | H0657: 1, H0156: 1, | | |
| | | | | | | Pro-98 to Asn-109, | H0014: 1, H0623: 1, | | |
| | | | | | | His-119 to Tyr-129. | H0144: 1, S0148: 1, | | |
| | | | | | | | S0152: 1, H0521: 1 and | | |
| | | | | | | | L0740: 1. | | |
| | | 914737 | 215 | 91-450 | 480 | Gly-12 to Lys-23, | | | |
| | | | | | | Glu-34 to Glu-53, | | | |
| | | | | | | Val-74 to Lys-84, | | | |
| | | | | | | Pro-98 to Asn-109. | | | |
| 58 | HMEKQ12 | 910713 | 68 | 86-358 | 333 | | AR061: 2, AR089: | 1 | |
| | | | | | | | L0118: 1, H0266: 1, | | |
| | | | | | | | H0267: 1, H0553: 1 and | | |
| | | | | | | | L0769: 1. | | |
| 59 | HNDAA52 | 1074878 | 69 3-761 | 334 | Asp-13 to Ile-18, | AR089: 7, AR061: 2 | | | |
| | | | | | | Pro-44 to Asn-54, | H0517: 1, L0766: 1 | | |
| | | | | | | Leu-91 to Tyr-97, | and L0438: 1. | | |
| | | | | | | Asn-135 to Trp-146, | | | |
| | | | | | | Ser-157 to Asn-162, | | | |
| | | | | | | Asp-171 to Gln-179. | | | |
| | | 910748 | 216 | 3-617 | 481 | Asp-13 to Ile-18, | | | |
| | | | | | | Pro-44 to Asn-54, | | | |
| | | | | | | Leu-91 to Tyr-97, | | | |
| | | | | | | Asn-135 to Trp-146, | | | |
| | | | | | | Ser-157 to Asn-162, | | | |
| | | | | | | Trp-170 to Thr-175. | | | |
| 60 | HNHBF47 | 949027 | 70 | 923-501 | 335 | His-1 to Thr-14. | AR051: 11, AR054: 8, | 1 | |
| | | | | | | | AR050: 7, AR061: 1, | | |
| | | | | | | | AR089: 0 | | |
| | | | | | | | S0053: 1 | | |
| 61 | HODFW19 | 947662 | 71 | 224-361 | 336 | Lys-1 to Ser-10. | AR061: 135,AR089: | | |
| | | | | | | | 29, AR051: 2, AR050: | | |
| | | | | | | | 1 | | |
| | | | | | | | L0748: 6, H0615: 3, | | |
| | | | | | | | H0624: 2, H0170: 2, | | |
| | | | | | | | H0255: 2, L0776: 2, | | |
| | | | | | | | H0436: 2, H0542: 2, | | |
| | | | | | | | S0134: 1, H0580: 1, | | |
| | | | | | | | H0392: 1, H0266: 1, | | |
| | | | | | | | H0163: 1, L0800: 1, | | |
| | | | | | | | L0766: 1, L0541: 1, | | |
| | | | | | | | H0520: 1, S0196: 1 and | | |
| | | | | | | | H0543: 1. | | |
| | | 971362 | 217 | 79-1359 | 482 | Ala-33 to Thr-38, | | | |
| | | | | | | Asp-53 to Thr-60, | | | |
| | | | | | | Pro-88 to Ala-94, | | | |
| | | | | | | Ser-144 to Leu-151, | | | |
| | | | | | | Asp-163 to Ala-168. | | | |
| 62 | HOHEC71 | 1217039 | 72 | 3-2375 | 337 | Pro-19 to Gln-27, | AR089: 1, AR061: 1 | | |
| | | | | | | Gly-44 to Tyr-50, | L0743: 13, S0222: 10, | | |
| | | | | | | Ala-58 to Lys-64, | L0438: 9, H0052: 7, | | |
| | | | | | | Ser-74 to Arg-81, | S0040: 5, H0009: 5, | | |
| | | | | | | Val-215 to Arg-221, | L0741: 5, L0748: 5, | | |
| | | | | | | Asn-231 to Gly-239, | L0740: 5, L0747: 5, | | |
| | | | | | | Leu-253 to Tyr-260, | L0731: 5, H0620: 4, | | |
| | | | | | | Ala-283 to Thr-288, | T0010: 4, S0250: 4, | | |
| | | | | | | Asp-303 to Pro-309, | T0006: 4, S0038: 4, | | |
| | | | | | | Pro-321 to Gly-327, | H0100: 4, L0745: 4, | | |
| | | | | | | Arg-394 to Leu-401, | L0758: 4, S0276: 4, | | |
| | | | | | | Asp-413 to Ala-418, | S6024: 3, S0001: 3, | | |
| | | | | | | Ser-539 to Ser-546, | S0007: 3, L0717: 3, | | |
| | | | | | | Arg-577 to Arg-582, | H0013: 3, S0049: 3, | | |
| | | | | | | Thr-620 to Ser-625, | H0024: 3, H0594: 3, | | |
| | | | | | | Glu-642 to Glu-648, | H0135: 3, L0662: 3, | | |
| | | | | | | Ala-669 to Trp-675, | H0539: 3, H0550: 2, | | |
| | | | | | | Phe-677 to Asp-703, | H0333: 2, H0172: 2, | | |
| | | | | | | Ala-767 to Lys-773, | H0123: 2, S0051: 2, | | |
| | | | | | | Gly-778 to Lys-791. | H0099: 2, H0188: 2, | | |
| | | | | | | | H0644: 2, H0617: 2, | | |
| | | | | | | | L0351: 2, L0369: 2, | | |
| | | | | | | | L0769: 2, L0638: 2, | | |
| | | | | | | | L0774: 2, L0659: 2, | | |
| | | | | | | | L0789: 2, S0126: 2, | | |
| | | | | | | | H0682: 2, S0044: 2, | | |
| | | | | | | | S0028: 2, L0742: 2, | | |
| | | | | | | | L0439: 2, L0756: 2, | | |
| | | | | | | | L0752: 2, L0753: 2, | | |
| | | | | | | | L0759: 2, L0597: 2, | | |
| | | | | | | | L0605: 2, L0601: 2, | | |
| | | | | | | | L0600: 2, H0341: 1, | | |
| | | | | | | | S0029: 1, S0045: 1, | | |
| | | | | | | | H0619: 1, H0393: 1, | | |
| | | | | | | | S6026: 1, H0261: 1, | | |
| | | | | | | | H0549: 1, S6014: 1, | | |
| | | | | | | | H0392: 1, H0455: 1, | | |
| | | | | | | | H0600: 1, H0587: 1, | | |
| | | | | | | | H0485: 1, H0427: 1, | | |
| | | | | | | | S0280: 1, L0021: 1, | | |
| | | | | | | | T0082: 1, H0618: 1, | | |
| | | | | | | | S0010: 1, H0007: 1, | | |
| | | | | | | | H0085: 1, H0235: 1, | | |
| | | | | | | | H0327: 1, H0545: 1, | | |
| | | | | | | | H0081: 1, H0012: 1, | | |
| | | | | | | | H0082: 1, H0020: 1, | | |
| | | | | | | | H0051: 1, S6028: 1, | | |
| | | | | | | | H0286: 1, H0424: 1, | | |
| | | | | | | | H0418: 1, H0628: 1, | | |
| | | | | | | | H0124: 1, S0036: 1, | | |
| | | | | | | | H0040: 1, H0063: 1, | | |
| | | | | | | | H0116: 1, H0132: 1, | | |
| | | | | | | | H0652: 1, L0763: 1, | | |
| | | | | | | | L0646: 1, L0794: 1, | | |
| | | | | | | | L0766: 1, L0650: 1, | | |
| | | | | | | | L0651: 1, L0653: 1, | | |
| | | | | | | | L0792: 1, L0666: 1, | | |
| | | | | | | | L0663: 1, L0665: 1, | | |
| | | | | | | | H0144: 1, S0380: 1, | | |
| | | | | | | | L0754: 1, L0755: 1, | | |
| | | | | | | | S0031: 1, L0608: 1, | | |
| | | | | | | | L0366: 1, H0653: 1 and | | |
| | | | | | | | H0352: 1. | | |
| | | 939540 | 218 | 3-497 | 483 | | | | |
| 63 | HSDKI91 | 1165365 | 73 | 420-656 | 338 | AR061: 3, AR089: 2 | | | |
| | | | | | | | L0749: 2, S0376: 1, | | |
| | | | | | | | S0046: 1, H0013: 1, | | |
| | | | | | | | H0156: 1, H0615: 1, | | |
| | | | | | | | L0527: 1, L0519: 1, | | |
| | | | | | | | S0260: 1 and L0605: 1. | | |
| | | 734895 | 219 | 216-437 | 484 | Ile-19 to Leu-26, | | | |
| | | | | | | Pro-36 to Phe-42. | | | |
| 64 | HUCNE72 | 1162859 | 74 | 3-1358 | 339 | Thr-1 to Gly-8, | AR089: 6, AR061: 4 | | |
| | | | | | | Lys-34 to Tyr-39, | L0439: 11, L0758: 7, | | |
| | | | | | | Lys-47 to Arg-53, | H0539: 5, L0750: 4, | | |
| | | | | | | Ser-116 to Leu-123, | L0794: 3, L0666: 3, | | |
| | | | | | | Asp-171 to Glu-182, | L0749: 3, L0779: 3, | | |
| | | | | | | Tyr-359 to Glu-367, | L0591: 3, H0657: 2, | | |
| | | | | | | Tyr-384 to Lys-391, | L0471: 2, L0766: 2, | | |
| | | | | | | Ser-398 to Ile-403. | L0649: 2, L0803: 2, | | |
| | | | | | | | L0654: 2, H0702: 2, | | |
| | | | | | | | L0588: 2, H0423: 2, | | |
| | | | | | | | H0650: 1, S0418: 1, | | |
| | | | | | | | S0420: 1, S0358: 1, | | |
| | | | | | | | S0045: 1, H0550: 1, | | |
| | | | | | | | H0156: 1, L0021: 1, | | |
| | | | | | | | H0024: 1, H0591: 1, | | |
| | | | | | | | H0038: 1, H0040: 1, | | |
| | | | | | | | H0551: 1, H0264: 1, | | |
| | | | | | | | H0488: 1, H0059: 1, | | |
| | | | | | | | H0494: 1, H0641: 1, | | |
| | | | | | | | L0369: 1, L0800: 1, | | |
| | | | | | | | L0521: 1, L0651: 1, | | |
| | | | | | | | L0806: 1, L0657: 1, | | |
| | | | | | | | L0663: 1, L0665: 1, | | |
| | | | | | | | H0648: 1, H0672: 1, | | |
| | | | | | | | S0378: 1, S0152: 1, | | |
| | | | | | | | H0521: 1, S0168: 1, | | |
| | | | | | | | L0748: 1, H0444: 1, | | |
| | | | | | | | H0343: 1, S0026: 1, | | |
| | | | | | | | H0136: 1, S0242: 1 and | | |
| | | | | | | | H0543: 1. | | |
| | | 902725 | 220 | 1-873 | 485 | Val-3 to Ser-11, | | | |
| | | | | | | Cys-76 to Gly-83, | | | |
| | | | | | | Lys-109 to Tyr-114, | | | |
| | | | | | | Lys-122 to Arg-128. | | | |
| 65 | HCEOW20 | 944273 | 75 | 2-421 | 340 | Ala-1 to Ser-8, | AR089: 10, AR061: 9 | | |
| | | | | | | Ser-41 to Cys-54, | L0747: 2, S0222: 1, | | |
| | | | | | | Asn-96 to Asp-103. | H0052: 1, S6028: 1, | | |
| | | | | | | | L0769: 1, L0768: 1, | | |
| | | | | | | | L0777: 1 and L0366: 1. | | |
| | | 946967 | 221 | 2-421 | 486 | Ala-1 to Ser-8, | | | |
| | | | | | | Ser-41 to Cys-54, | | | |
| | | | | | | Asn-96 to Asp-103. | | | |
| | | 949234 | 222 | 1847-1281 | 487 | Ala-1 to Gln-7, | | | |
| | | | | | | Lys-24 to Ser-30, | | | |
| | | | | | | Pro-44 to Ser-57, | | | |
| | | | | | | Ser-90 to Cys-103, | | | |
| | | | | | | Asn-145 to Asp-152. | | | |
| 66 | HDPJZ04 | 1228281 | 76 | 66-593 | 341 | Ala-13 to Leu-18, | AR089: 20, AR061: 2 | | |
| | | | | | | Pro-35 to Tyr-45, | H0521: 20, H0090: 2, | | |
| | | | | | | His-49 to Asn-55, | H0522: 2, H0619: 1, | | |
| | | | | | | Ser-124 to Trp-133. | H0457: 1, H0111: 1, | | |
| | | | | | | | H0598: 1, S0426: 1, | | |
| | | | | | | | S0052: 1 and H0539: 1. | | |
| | | 951278 | 223 | 67-732 | 488 | Ala-13 to Leu-18, | | | |
| | | | | | | Pro-35 to Tyr-45, | | | |
| | | | | | | His-49 to Asn-55, | | | |
| | | | | | | Ser-102 to Asn-111, | | | |
| | | | | | | Ser-116 to Leu-130, | | | |
| | | | | | | Ser-170 to Trp-179. | | | |
| 67 | HCQCI06 | 915000 | 77 | 3-764 | 342 | Arg-16 to Ile-28, | AR061: 4, AR089: 2 | | |
| | | | | | | Glu-39 to Ser-46, | L0747: 6, L0777: 5, | | |
| | | | | | | Lys-52 to Leu-57, | L0794: 4, S0126: 4, | | |
| | | | | | | Glu-71 to Val-77, | S0242: 3, H0624: 2, | | |
| | | | | | | Thr-90 to Lys-114, | H0171: 2, H0014: 2, | | |
| | | | | | | Asn-141 to His-152, | L0803: 2, L0809: 2, | | |
| | | | | | | Leu-160 to Asp-171, | S0374: 2, L0779: 2, | | |
| | | | | | | Lys-249 to Asn-254. | L0759: 2, H0170: 1, | | |
| | | | | | | | S0040: 1, S0342: 1, | | |
| | | | | | | | H0344: 1, T0049: 1, | | |
| | | | | | | | S0356: 1, S0358: 1, | | |
| | | | | | | | H0486: 1, H0013: 1, | | |
| | | | | | | | L0022: 1, T0082: 1, | | |
| | | | | | | | L0105: 1, H0596: 1, | | |
| | | | | | | | H0266: 1, H0687: 1, | | |
| | | | | | | | S0250: 1, H0553: 1, | | |
| | | | | | | | L0763: 1, L0770: 1, | | |
| | | | | | | | L0662: 1, L0804: 1, | | |
| | | | | | | | L0655: 1, L0783: 1, | | |
| | | | | | | | L0787: 1, L0663: 1, | | |
| | | | | | | | L0565: 1, S0432: 1, | | |
| | | | | | | | L0744: 1, L0758: 1, | | |
| | | | | | | | L0601: l, S0196: 1 and | | |
| | | | | | | | H0506: 1. | | |
| 68 | HE8UT58 | 973153 | 78 | 3-662 | 343 | AAR089: 8, AR061: 7 | | | |
| | | | | | | | L0439: 4, L0751: 4, | | |
| | | | | | | | L0805: 3, H0674: 2, | | |
| | | | | | | | L0518: 2, L0809: 2, | | |
| | | | | | | | L0789: 2, L0731: 2, | | |
| | | | | | | | L0758: 2, H0661: 1, | | |
| | | | | | | | L0619: 1, S0358: 1, | | |
| | | | | | | | H0013: 1, H0156: 1, | | |
| | | | | | | | H0390: 1, H0544: 1, | | |
| | | | | | | | H0570: 1, S0051: 1, | | |
| | | | | | | | T0006: 1, H0032: 1, | | |
| | | | | | | | H0673: 1, S0036: 1, | | |
| | | | | | | | L0769: 1, L0800: 1, | | |
| | | | | | | | L0794: 1, L0803: 1, | | |
| | | | | | | | L0661. 1, L0636. 1, | | |
| | | | | | | | L0529: 1, L0543: 1, | | |
| | | | | | | | L0665: 1, H0521: 1, | | |
| | | | | | | | H0696: 1, H0694: 1, | | |
| | | | | | | | L0747: 1, L0779: 1, | | |
| | | | | | | | L0777: 1, L0752: 1 and | | |
| | | | | | | | H0352: 1. | | |
| 69 | HFXJI27 | 971046 | 79 | 173-367 | 344 | Pro-48 to Leu-53. | AR089: 10, AR061: 7 | | |
| | | | | | | | L0754: 21, H0553: 10, | | |
| | | | | | | | H0574: 6, L0771: 5, | | |
| | | | | | | | L0598: 4, L0659: 4, | | |
| | | | | | | | L0663: 4, L0745: 4, | | |
| | | | | | | | L0731: 4, L0599: 4, | | |
| | | | | | | | S0414: 3, H0328: 3, | | |
| | | | | | | | L0776: 3, L0439: 3, | | |
| | | | | | | | L0756: 3, H0624: 2, | | |
| | | | | | | | S0358: 2, S0376: 2, | | |
| | | | | | | | S0444: 2, L0717: 2, | | |
| | | | | | | | H0596: 2, H0687: 2, | | |
| | | | | | | | H0615: 2, L0646: 2, | | |
| | | | | | | | L0662: 2, L0803: 2, | | |
| | | | | | | | L0774: 2, L0438: 2, | | |
| | | | | | | | H0670: 2, S0330: 2, | | |
| | | | | | | | H0478: 2, L0779: 2, | | |
| | | | | | | | L0777: 2, L0755: 2, | | |
| | | | | | | | S0260: 2, S0452: 2, | | |
| | | | | | | | H0171: 1, S0402: 1, | | |
| | | | | | | | H0583: 1, H0650: 1, | | |
| | | | | | | | H0341: 1, S0282: 1, | | |
| | | | | | | | H0638: 1, S0360: 1, | | |
| | | | | | | | S0132: 1, H0497: 1, | | |
| | | | | | | | H0632: 1, H0156: 1, | | |
| | | | | | | | H0575: 1, L0105: 1, | | |
| | | | | | | | H0052: 1, H0251: 1, | | |
| | | | | | | | H0545: 1, L0471: 1, | | |
| | | | | | | | H0012: 1, H0051: 1, | | |
| | | | | | | | H0510: 1, S0003: 1, | | |
| | | | | | | | S0214: 1, H0622: 1, | | |
| | | | | | | | H0124: 1, H0090: 1, | | |
| | | | | | | | H0591: 1, H0038: 1, | | |
| | | | | | | | H0616: 1, H0551: 1, | | |
| | | | | | | | T0067: 1, H0413: 1, | | |
| | | | | | | | L0065: 1, S0422: 1, | | |
| | | | | | | | UNKWN: 1, L0649: 1, | | |
| | | | | | | | L0378: 1, L0655: 1, | | |
| | | | | | | | L0517: 1, L0783: 1, | | |
| | | | | | | | L0666: 1, L0664: 1, | | |
| | | | | | | | L0665: 1, H0144: 1, | | |
| | | | | | | | S0374: 1, H0520: 1, | | |
| | | | | | | | H0519: 1, S0126: 1, | | |
| | | | | | | | H0684: 1, H0658: 1, | | |
| | | | | | | | H0666: 1, H0521: 1, | | |
| | | | | | | | L0746: 1, L0750: 1, | | |
| | | | | | | | L0786: 1, L0591: 1, | | |
| | | | | | | | L0485: 1, L0593: 1, | | |
| | | | | | | | S0026: 1, S0192: 1, | | |
| | | | | | | | S0242: 1, H0677: 1 and | | |
| | | | | | | | H0506: 1. | | |
| | | 975381 | 224 | 3-599 | 489 | His-1 to Thr-8, | | | |
| | | | | | | Val-11 to Tyr-20, | | | |
| | | | | | | Lys-89 to Arg-105, | | | |
| | | | | | | Gln-124 to His-131, | | | |
| | | | | | | Gln-147 to Ser-170. | | | |
| 70 | HLHCT68 | 764745 | 80 | 44-217 | 345 | | AR061: 7, AR089: 6 | | |
| | | | | | | | L0748: 2 and H0024: | | |
| | | | | | | | 1. | | |
| 71 | HMAMB94 | 910909 | 81 | 3-587 | 346 | Trp-1 to Gly-6, | AR061: 1, AR089: 1 | | |
| | | | | | | Gln-20 to Asn-26, | H0266: 2, H0644: 2, | | |
| | | | | | | Pro-30 to Glu-35, | H0341: 1, S0278: 1, | | |
| | | | | | | Asn-43 to Tyr-50, | H0051: 1, L0602: 1 and | | |
| | | | | | | Ser-57 to Pro-65, | L0601: 1. | | |
| | | | | | | Ser-74 to Thr-82, | | | |
| | | | | | | Lys-98 to Gly-107, | | | |
| | | | | | | Asp-119 to Asn-125, | | | |
| | | | | | | Gly-159 to Glu-166. | | | |
| 72 | KNTAF23 | 910947 | 82 | 24-251 | 347 | His-1 to Gly-12, | AR089: 2,AR061: 1 | | |
| | | | | | | Trp-69 to Glu-75. | L0439: 4, S0192: 3, | | |
| | | | | | | | L0776: 2, L0438: 2, | | |
| | | | | | | | L0777: 2, H0254: 1, | | |
| | | | | | | | L0534: 1, H0333: 1, | | |
| | | | | | | | L0763: 1, H0519: 1, | | |
| | | | | | | | H0593: 1, L0750: 1, | | |
| | | | | | | | L0779: 1 and L0758: 1. | | |
| 73 | HTEED80 | 849075 | 83 | 182-850 | 348 | AR089: 13, AR061: 12 | | | |
| | | | | | | | L0766: 5, L0759: 5, | | |
| | | | | | | | L0794: 3, L0775: 3, | | |
| | | | | | | | L0779: 3, H0038: 2, | | |
| | | | | | | | L0763: 2, L0774: 2, | | |
| | | | | | | | L0518: 2, L0528: 2, | | |
| | | | | | | | L0790: 2, L0665: 2, | | |
| | | | | | | | H0144: 2, H0670: 2, | | |
| | | | | | | | L0599: 2, H0663: 1, | | |
| | | | | | | | S0444: 1, H0486: 1, | | |
| | | | | | | | T0060: 1, H0013: 1, | | |
| | | | | | | | S0280: 1, S0050: 1, | | |
| | | | | | | | S6028: 1, H0615: 1, | | |
| | | | | | | | H0030: 1, H0553: 1, | | |
| | | | | | | | H0634: 1, H0647: 1, | | |
| | | | | | | | H0654: 1, H0529: 1, | | |
| | | | | | | | L0638: 1, L0761: 1, | | |
| | | | | | | | L0771: 1, L0773: 1, | | |
| | | | | | | | L0767: 1, L0387: 1, | | |
| | | | | | | | L0803: 1, L0804: 1, | | |
| | | | | | | | L0607: 1, L0657: 1, | | |
| | | | | | | | L0517: 1, L0809: 1, | | |
| | | | | | | | H0648: 1, H0672: 1, | | |
| | | | | | | | L0748: 1, L0740: 1, | | |
| | | | | | | | L0749: 1, L0756: 1, | | |
| | | | | | | | L0758: 1, L0591: 1, | | |
| | | | | | | | L0592: 1 and H0543: 1. | | |
| 74 | HTLAQ18 | 811792 | 84 | 2-493 | 349 | Ala-1 to Glu-11. | AR061: 11, AR089: 6 | | |
| | | | | | | | L0779: 3, L0758: 3, | | |
| | | | | | | | H0618: 2, H0253: 1, | | |
| | | | | | | | H0009: 1 and H0012: 1. | | |
| 75 | HNHAF61 | 1093210 | 85 | 286-744 | 350 | | AR061: 6, AR089: 3 | | |
| | | | | | | | L0438: 2, L0439: 2, | | |
| | | | | | | | L0752: 2, L0365: 1 and | | |
| | | | | | | | S0053: 1. | | |
| | | 742116 | 225 | 189-686 | 490 | Pro-5 to Trp-10, | | | |
| | | | | | | Glu-62 to Gly-67, | | | |
| | | | | | | Ala-124 to Asn-129. | | | |
| | | 955094 | 226 | 378-1 | 491 | Thr-56 to Pro-64, | | | |
| | | | | | | Pro-77 to Thr-87, | | | |
| | | | | | | Thr-95 to Glu-100, | | | |
| | | | | | | Asp-112 to Thr-118. | | | |
| 76 | HNTSN26 | 1154066 | 86 | 3-1235 | 351 | Lys-45 to Gly-51, | AR051: 20, AR050: | | |
| | | | | | | Ala-220 to His-225, | 13, AR054: 10, AR061: | | |
| | | | | | | Arg-230 to Gly-235, | 1, AR089: 1 | | |
| | | | | | | Glu-251 to Arg-261, | L0439: 9, H0013: 4, | | |
| | | | | | | Trp-328 to Cys-339, | L0438: 4, S0007: 3, | | |
| | | | | | | Glu-342 to Thr-347, | H0156: 2, S0010: 2, | | |
| | | | | | | Pro-366 to Lys-375, | H0644: 2, L0776: 2, | | |
| | | | | | | Leu-391 to Asn-400. | L0789: 2, L0753: 2, | | |
| | | | | | | | L0731: 2, L0758: 2, | | |
| | | | | | | | L0593: 2, H0052: 1, | | |
| | | | | | | | H0615: 1, H0400: 1, | | |
| | | | | | | | T0067: 1, S0386: 1, | | |
| | | | | | | | L0770: 1, L0769: 1, | | |
| | | | | | | | L0803: 1, L0805: 1, | | |
| | | | | | | | L0367: 1, L0666: 1, | | |
| | | | | | | | H0144: 1, H0547: 1, | | |
| | | | | | | | H0539: 1, S0380: 1, | | |
| | | | | | | | L0786: 1 and L0752: 1. | | |
| | | 910730 | 227 | 51-284 | 492 | Arg-3 to Cys-12. | | | |
| 77 | HPWBS63 | 1153910 | 87 | 1-435 | 352 | Arg-32 to Leu-37, | AR061: 17, AR089: 12 | | |
| | | | | | | Asp-53 to His-67, | L0769: 11, L0747: 10, | | |
| | | | | | | Lys-86 to Lys-91, | L0766: 8, L0742: 7, | | |
| | | | | | | Val-134 to Lys-145. | L0752: 6, L0777: 4, | | |
| | | | | | | | L0770: 3, L0794: 3, | | |
| | | | | | | | L0754: 3, H0266: 2, | | |
| | | | | | | | L0761: 2, L0774: 2, | | |
| | | | | | | | L0806: 2, L0439: 2, | | |
| | | | | | | | S0040: 1, H0484: 1, | | |
| | | | | | | | H0254: 1, H0255: 1, | | |
| | | | | | | | H0600: 1, S0210: 1, | | |
| | | | | | | | L0800: 1, L0764: 1, | | |
| | | | | | | | L0771: 1, L0773: 1, | | |
| | | | | | | | L0662: 1, L0775: 1, | | |
| | | | | | | | L0652: 1, L0665: 1, | | |
| | | | | | | | S0044: 1, L0745: 1, | | |
| | | | | | | | L0750: 1, L0786: 1 and | | |
| | | | | | | | L0757: 1. | | |
| | | 910750 | 228 | 3-830 | 493 | Arg-56 to Asp-62. | | | |
| 78 | HBODA38 | 923456 | 88 | 352-1470 | 353 | Pro-12 to Thr-23, | AR089: 39, AR061: 15 | | |
| | | | | | | Glu-49 to Val-56, | S0364: 10, H0373: 7, | | |
| | | | | | | Leu-77 to Tyr-83, | L0604: 7, H0196: 4, | | |
| | | | | | | Ala-125 to Glu-138, | L0485: 3, L0002: 1, | | |
| | | | | | | Tyr-144 to Gly-154, | H0411: 1, H0599: 1, | | |
| | | | | | | Gly-227 to Thr-233, | H0327: 1, L0471: 1, | | |
| | | | | | | His-286 to Arg-292, | L0163: 1, S0366: 1, | | |
| | | | | | | Pro-366 to Lys-373. | L0747: 1 and L0750: 1. | | |
| 79 | HEONO59 | 741361 | 89 | 325-756 | 354 | | AR089: 5, AR061: 3 | | |
| | | | | | | | H0457: 1 and L0752: | | |
| | | | | | | | 1. | | |
| 80 | HSSJM44 | 871067 | 90 | 406-960 | 355 | Cys-1 to His-7. | AR089: 1, AR061: 1 | | |
| | | | | | | | L0439: 5, H0620: 3, | | |
| | | | | | | | L0769: 3, H0556: 2, | | |
| | | | | | | | H0012: 2, H0024: 2, | | |
| | | | | | | | S0051: 2, H0100: 2, | | |
| | | | | | | | L0770: 2, L0774: 2, | | |
| | | | | | | | L0438: 2, L0751: 2, | | |
| | | | | | | | L0779: 2, S0444: 1, | | |
| | | | | | | | H0550: 1, H0013: 1, | | |
| | | | | | | | H0575: 1, S0010: 1, | | |
| | | | | | | | H0421: 1, H0052: 1, | | |
| | | | | | | | T0110: 1, H0545: 1, | | |
| | | | | | | | H0009: 1, H0050: 1, | | |
| | | | | | | | H0083: 1, H0604: 1, | | |
| | | | | | | | S0036: 1, H0135: 1, | | |
| | | | | | | | H0038: 1, H0551: 1, | | |
| | | | | | | | H0264: 1, H0059: 1, | | |
| | | | | | | | L0564: 1, L0637: 1, | | |
| | | | | | | | L0772: 1, L0771: 1, | | |
| | | | | | | | L0499: 1, L0806: 1, | | |
| | | | | | | | H0547: 1, S0152: 1, | | |
| | | | | | | | H0555: 1, L0747: 1, | | |
| | | | | | | | L0777: 1, L0755: 1, | | |
| | | | | | | | L0758: 1, L0592: 1, | | |
| | | | | | | | H0423: 1 and H0352: 1. | | |
| 81 | HEQAY32 | 869178 | 91 | 604-924 | 356 | Pro-23 to Ala-30, | AR089: 2, AR061: 0 | | |
| | | | | | | Arg-63 to Pro-68, | L0438: 6, L0439: 5, | | |
| | | | | | | Gly-80 to Trp-85, | H0052: 3, L0743: 3, | | |
| | | | | | | Asn-92 to Gly-101. | L0731: 3, H0265: 2, | | |
| | | | | | | | H0617: 2, H0634: 2, | | |
| | | | | | | | L0769: 2, L0766: 2, | | |
| | | | | | | | L0381: 2, L0751: 2, | | |
| | | | | | | | L0749: 2, L0758: 2, | | |
| | | | | | | | S0282: 1, S0356: 1, | | |
| | | | | | | | H0675: 1, S0132: 1, | | |
| | | | | | | | H0645: 1, S0222: 1, | | |
| | | | | | | | H0438: 1, T0082: 1, | | |
| | | | | | | | H0194: 1, H0544: 1, | | |
| | | | | | | | H0178: 1, H0355: 1, | | |
| | | | | | | | H0428: 1, H0181: 1, | | |
| | | | | | | | H0361: 1, H0038: 1, | | |
| | | | | | | | H0040: 1, H0616: 1, | | |
| | | | | | | | H0063: 1, H0087: 1, | | |
| | | | | | | | T0067: 1, H0059: 1, | | |
| | | | | | | | H0649: 1, S0002: 1, | | |
| | | | | | | | H0529: 1, L0535: 1, | | |
| | | | | | | | L0761: 1, L0646: 1, | | |
| | | | | | | | L0771: 1, L0767: 1, | | |
| | | | | | | | L0806: 1, L0653: 1, | | |
| | | | | | | | L0776: 1, L0659: 1, | | |
| | | | | | | | L0789: 1, L0663: 1, | | |
| | | | | | | | H0144: 1, L0565: 1, | | |
| | | | | | | | H0690: 1, H0682: 1, | | |
| | | | | | | | H0696: 1, H0436: 1, | | |
| | | | | | | | S0028: 1, L0741: 1, | | |
| | | | | | | | L0759: 1, H0667: 1, | | |
| | | | | | | | S0276: 1, H0542: 1 and | | |
| | | | | | | | H0423: 1. | | |
| 82 | HAMFL82 | 910074 | 92 | 3-317 | 357 | Glu-20 to Val-26. | AR089: 9, AR061: 4 | | |
| | | | | | | | H0229: 1,H0590: 1, | | |
| | | | | | | | S0049: 1, H0014: 1, | | |
| | | | | | | | H0560: 1, L0439: 1 and | | |
| | | | | | | | H0543: 1. | | |
| 83 | HCE5178 | 934531 | 93 | 3-422 | 358 | Pro-14 to Gln-20, | AR061: 5, AR089: 2 | | |
| | | | | | | Ala-29 to Ala-52, | L0439: 8, H0052: 7, | | |
| | | | | | | Tyr-64 to Ser-70, | L0741: 7, L0756: 4, | | |
| | | | | | | Ser-103 to His-120. | S0010: 3, H0261: 2, | | |
| | | | | | | | H0156: 2, S0049: 2, | | |
| | | | | | | | L0770: 2, L0776. 2, | | |
| | | | | | | | L0742: 2, L0745: 2, | | |
| | | | | | | | L0366: 2, S0222: 1, | | |
| | | | | | | | H0438: 1, H0390: 1, | | |
| | | | | | | | S0346: 1, H0009: 1, | | |
| | | | | | | | L0455: 1, S0038: 1, | | |
| | | | | | | | L0789: 1 and L0758: 1. | | |
| 84 | HCE5J51 | 1195672 | 94 | 2-802 | 359 | | AR061: 4, AR089: 2 | | |
| | | | | | | | H0052: 7, L0809: 4, | | |
| | | | | | | | H0663: 3, L0439: 3, | | |
| | | | | | | | L0752: 3, H0587: 2, | | |
| | | | | | | | L0565: 2, H0550: 1, | | |
| | | | | | | | H0194: 1, H0562: 1, | | |
| | | | | | | | H0571: 1, L0435: 1, | | |
| | | | | | | | L0769: 1, L0787: 1 and | | |
| | | | | | | | L0755: 1. | | |
| | | 934524 | 229 | 227-781 | 494 | Pro-15 to Cys-22. | | | |
| 85 | HCEEN06 | 1150643 | 95 | 654-118 | 360 | Pro-7 to Pro-14. | AR089: 6, AR061: 3 | | |
| | | | | | | | L0666: 6, L0761: 4, | | |
| | | | | | | | H0486: 3, L0794: 3, | | |
| | | | | | | | L0659: 3, H0255: 2, | | |
| | | | | | | | S0358: 2, H0052: 2, | | |
| | | | | | | | L0809: 2, L0743: 2, | | |
| | | | | | | | L0759: 2, H0692: 1, | | |
| | | | | | | | S0116: 1, H0581: 1, | | |
| | | | | | | | H0597: 1, L0055: 1, | | |
| | | | | | | | H0087: 1, L0763: 1, | | |
| | | | | | | | L0800: 1, L0644: 1, | | |
| | | | | | | | L0764: 1, L0766: 1, | | |
| | | | | | | | L0375: 1, L0655: 1, | | |
| | | | | | | | L0788: 1, L0663: 1, | | |
| | | | | | | | S0310: 1, H0672: 1, | | |
| | | | | | | | S0328: 1, H0539: 1 and | | |
| | | | | | | | H0436: 1. | | |
| | | 878658 | 230 | 2-619 | 495 | Ser-1 to Ala-10, | | | |
| | | | | | | Cys-23 to Ala-29. | | | |
| 86 | HCEPU56 | 920347 | 96 | 219-593 | 361 | Lys-16 to Thr-22, | AR061: 6, AR089: 5 | | |
| | | | | | | Lys-55 to Gly-60, | | | |
| | | | | | | Lys-67 to His-73, | | | |
| | | | | | | Asn-91 to Asp-97. | | | |
| 87 | HDPKI83 | 883382 | 97 | 101-673 | 362 | Pro-19 to Lys-29, | AR061: 3, AR089: 3 | | |
| | | | | | | His-38 to Phe-45, | H0521: 7, H0580: 5, | | |
| | | | | | | Ile-52 to Gln-66, | L0665: 4, H0457: 3, | | |
| | | | | | | Glu-123 to Glu-138. | L0766: 3, L0745: 3, | | |
| | | | | | | | L0761: 2, L0806: 2, | | |
| | | | | | | | L0789: 2, L0750: 2, | | |
| | | | | | | | H0542: 2, H0650: 1, | | |
| | | | | | | | H0656: 1, H0581: 1, | | |
| | | | | | | | H0271: 1, H0553: 1, | | |
| | | | | | | | H0413: 1, H0641: 1, | | |
| | | | | | | | S0002: 1, L0774: 1, | | |
| | | | | | | | H0660: 1, H0555: 1, | | |
| | | | | | | | L0753: 1 and H0423: 1. | | |
| 88 | HDPRU43 | 1221959 | 98 | 1227-2117 | 363 | | AR089: 1, AR061: 1 | | |
| | | | | | | | H0046: 34, L0731: 5, | | |
| | | | | | | | L0534: 4, L0769: 4, | | |
| | | | | | | | H0521: 4, S0356: 3, | | |
| | | | | | | | L0800: 3, L0794: 3, | | |
| | | | | | | | L0439: 3, L0749: 3, | | |
| | | | | | | | L0752: 3, L0759: 3, | | |
| | | | | | | | L0562: 2, H0486: 2, | | |
| | | | | | | | L0803: 2, L0805: 2, | | |
| | | | | | | | L0809: 2, L0789: 2, | | |
| | | | | | | | L0744: 2, L0485: 2, | | |
| | | | | | | | H0556: 1, H0657: 1, | | |
| | | | | | | | H0637: 1, H0580: 1, | | |
| | | | | | | | H0208: 1, H0261: 1, | | |
| | | | | | | | H0609: 1, H0455: 1, | | |
| | | | | | | | H0600: 1, H0586: 1, | | |
| | | | | | | | H0331: 1, H0635: 1, | | |
| | | | | | | | H0618: 1, H0544: 1, | | |
| | | | | | | | H0009: 1, H0050: 1, | | |
| | | | | | | | H0620: 1, H0288: 1, | | |
| | | | | | | | S0312: 1, S0314: 1, | | |
| | | | | | | | H0252: 1, H0688: 1, | | |
| | | | | | | | H0644: 1, S0366: 1, | | |
| | | | | | | | H0135: 1, H0063: 1, | | |
| | | | | | | | H0087: 1, H0551: 1, | | |
| | | | | | | | H0264: 1, S0002: 1, | | |
| | | | | | | | L0639: 1, L0771: 1, | | |
| | | | | | | | L0648: 1, L0766: 1, | | |
| | | | | | | | L0650: 1, L0378: 1, | | |
| | | | | | | | L0655: 1, H0699: 1, | | |
| | | | | | | | H0660: 1, L0743: 1, | | |
| | | | | | | | L0750: 1, L0777: 1, | | |
| | | | | | | | L0758: 1, L0097: 1, | | |
| | | | | | | | S0194: 1 and H0543: 1. | | |
| | | 909841 | 231 | 1-342 | 496 | Pro-8 to Gln-16. | | | |
| 89 | HE8QH09 | 1146260 | 99 | 3-887 | 364 | Ala-38 to Ser-45, | AR089: 3, AR061: 3 | | |
| | | | | | | Pro-55 to Leu-70, | H0261: 1, H0013: 1, | | |
| | | | | | | Asp-98 to Asp-106, | H0052: 1, H0009: 1, | | |
| | | | | | | Glu-121 to Leu-128, | H0144: 1 and L0438: 1. | | |
| | | | | | | Gly-136 to Asp-141. | | | |
| | | 934532 | 232 | 2-625 | 497 | Gly-4 to Thr-9. | | | |
| 90 | HE8UX76 | 1161437 | 100 | 3-1385 | 365 | Asp-8 to Ala-13, | AR061: 1, AR089: 1 | | |
| | | | | | | Ala-26 to Arg-33, | H0539: 4, L0439: 4, | | |
| | | | | | | Pro-38 to Ala-50, | L0438: 2, H0013: 1, | | |
| | | | | | | Pro-60 to Asn-65, | L0758: 1 and L0592: 1. | | |
| | | | | | | Asp-68 to Ser-74, | | | |
| | | | | | | Arg-109 to Arg-132, | | | |
| | | | | | | Asp-140 to Leu-145, | | | |
| | | | | | | Ala-149 to Ser-154, | | | |
| | | | | | | Ile-158 to Asp-169, | | | |
| | | | | | | Glu-171 to Ala-177, | | | |
| | | | | | | Cys-213 to Pro-218, | | | |
| | | | | | | Pro-226 to Lys-231, | | | |
| | | | | | | Thr-244 to Phe-249, | | | |
| | | | | | | Arg-361 to Thr-374, | | | |
| | | | | | | Pro-388 to Asp-393, | | | |
| | | | | | | Lys-452 to Leu-461. | | | |
| | | 767871 | 233 | 214-798 | 498 | Arg-39 to Arg-62, | | | |
| | | | | | | Asp-70 to Leu-75, | | | |
| | | | | | | Ala-79 to Ser-84, | | | |
| | | | | | | Ile-88 to Asp-99, | | | |
| | | | | | | Glu-101 to Ala-107. | | | |
| 91 | HEGAP32 | 851207 | 101 | 2-397 | 366 | Arg-1 to Thr-14. | AR061: 6, AR089: 3 | | |
| | | | | | | | H0550: 1, H0494: 1 | | |
| | | | | | | | and L0659: 1. | | |
| 92 | HETJX04 | 927120 | 102 | 3-704 | 367 | Asp-11 to Val-21, AR089: 4, AR061: 2 | | | |
| | | | | | | Pro-27 to Thr-43, | H0046: 1, H0032: 1, | | |
| | | | | | | Trp-92 to Lys-97, | H0040: 1 and L0565: 1. | | |
| | | | | | | Pro-136 to Gly-149, | | | |
| | | | | | | Met-182 to Val-193, | | | |
| | | | | | | Thr-197 to Asn-203. | | | |
| 93 | HFAAX29 | 934540 | 103 | 2-565 | 368 | AR089: 12, AR061: 4 | | | |
| | | | | | | | H0242: 2, S0040: 1, | | |
| | | | | | | | S6024: 1, S6014: 1, | | |
| | | | | | | | H0586: 1, H0013: 1, | | |
| | | | | | | | H0124: 1, L0756: 1, | | |
| | | | | | | | L0592: 1, L0366: 1 and | | |
| | | | | | | | H0542: 1. | | |
| 94 | HFIAH37 | 1188885 | 104 | 61-864 | 369 | Lys-65 to Thr-71, | AR089: 7, AR061: 1 | | |
| | | | | | | Lys-104 to Gly-109, | H0457: 2, H0529: 2, | | |
| | | | | | | Lys-116 to His-122, | H0561: 1, H0521: 1, | | |
| | | | | | | Asn-140 to Asp-146, | S0192: 1 and L0600: 1. | | |
| | | | | | | Lys-184 to Lys-203, | | | |
| | | | | | | Glu-205 to Asn-239, | | | |
| | | | | | | Ala-256 to Phe-267. | | | |
| | | 615597 | 234 | 70-375 | 499 | Lys-65 to Thr-71. | | | |
| 95 | HFIVB68 | 752981 | 105 | 82-663 | 370 | Thr-33 to Lys-47,AR061: 1, AR089: 1 | | | |
| | | | | | | Thr-70 to Ser-85, | H0013: 2, S0468: 1, | | |
| | | | | | | Asp-123 to Ser-128, | S0046: 1, H0592: 1, | | |
| | | | | | | Leu-150 to Asp-155. | H0266: 1, S3014: 1, | | |
| | | | | | | | S0028: 1 and S0196: 1. | | |
| 96 | HFPBW22 | 1151651 | 106 | 1147-761 | 371 | Lys-1 to Ala-6, | AR061: 4, AR089: 2 | | |
| | | | | | | Ala-17 to Leu-25, | S0222: 1, S0280: 1, | | |
| | | | | | | Arg-54 to Ala-59, | L0774: 1, L0376: 1 and | | |
| | | | | | | Val-61 to Arg-66, | S0378: 1. | | |
| | | | | | | Ser-90 to Gly-95. | | | |
| | | 750631 | 235 | 224-619 | 500 | | | | |
| 97 | HFPHI62 | 934529 | 107 | 3-410 | 372 | Met-1 to Gln-6, | AR061: 226, AR089: | | |
| | | | | | | Pro-38 to Asn-60. | 79 | | |
| | | | | | | | L0439: 8, H0052: 7, | | |
| | | | | | | | L0741: 7, L0756: 4, | | |
| | | | | | | | S0010: 3, H0261: 2, | | |
| | | | | | | | H0156: 2, S0049: 2, | | |
| | | | | | | | L0770: 2, L0776: 2, | | |
| | | | | | | | L0742: 2, L0745: 2, | | |
| | | | | | | | L0366: 2, S0222: 1, | | |
| | | | | | | | H0438: 1, H0390: 1, | | |
| | | | | | | | S0346: 1, H0009: 1, | | |
| | | | | | | | L0455: 1, S0038: 1, | | |
| | | | | | | | L0789: 1 and L0758: 1. | | |
| 98 | HFTDY67 | 745221 | 108 | 1-228 | 373 | Gly-23 to Phe-37. | AR089: 89, AR061: 75 | | |
| | | | | | | | S0002: 2, H0521: 2, | | |
| | | | | | | | S0360: 1, H0123: 1, | | |
| | | | | | | | S0250: 1, L0654: 1, | | |
| | | | | | | | S0152: 1, L0740: 1 and | | |
| | | | | | | | L0749: 1. | | |
| 99 | HFXLC69 | 1161235 | 109 | 17-940 | 374 | Gly-49 to Gly-60, | AR061: 1, AR089: 1 | | |
| | | | | | | Arg-84 to Cys-97, | H0052: 2, H0135: 2, | | |
| | | | | | | Pro-100 to Gln-106, | S0282: 1, H0254: 1, | | |
| | | | | | | Ala-113 to Gln-125. | S0051: 1, H0634: 1, | | |
| | | | | | | | S0152: 1, H0436: 1 and | | |
| | | | | | | | H0677: 1. | | |
| | | 692773 | 236 | 3-230 | 501 | | | | |
| 100 | HHEFQ42 | 1227523 | 110 | 3-1223 | 375 | Ala-14 to Leu-29, | AR089: 8,AR061: 3 | | |
| | | | | | | Ala-33 to Val-44, | L0803: 6, L0759: 6, | | |
| | | | | | | Pro-56 to Phe-63, | L0740: 4, S0410: 3, | | |
| | | | | | | His-65 to Lys-74, | L0764: 3, L0766: 3, | | |
| | | | | | | Val-133 to Tyr-141, | L0804: 3,H0144: 3, | | |
| | | | | | | Asp-149 to Lys-157, | S0406: 3, L0731: 3, | | |
| | | | | | | Arg-194 to Arg-199, | L0362: 3, S0358: 2, | | |
| | | | | | | Asp-216 to Leu-223, | S0444: 2, H0596: 2, | | |
| | | | | | | Pro-227 to Thr-232, | H0644: 2, H0124: 2, | | |
| | | | | | | Ala-239 to Glu-244, | L0770: 2, L0663: 2, | | |
| | | | | | | Val-256 to Thr-263, | H0539: 2, L0747: 2, | | |
| | | | | | | Asp-296 to Thr-305, | L0750: 2, L0779: 2, | | |
| | | | | | | Asp-323 to Asp-329, | L0757: 2, L0758: 2, | | |
| | | | | | | Thr-359 to Thr-365. | H0624: 1, H0171: 1, | | |
| | | | | | | | H0639: 1, L0717: 1, | | |
| | | | | | | | H0411: 1, S0222: 1, | | |
| | | | | | | | H0441: 1, H0431: 1, | | |
| | | | | | | | H0574: 1, H0013: 1, | | |
| | | | | | | | H0156: 1, H0085: 1, | | |
| | | | | | | | L0471: 1, T0023: 1, | | |
| | | | | | | | H0163: 1, H0130: 1, | | |
| | | | | | | | L0762: 1, L0763: 1, | | |
| | | | | | | | L0662: 1, L0794: 1, | | |
| | | | | | | | L0775: 1, L0375: 1, | | |
| | | | | | | | L0805: 1, L0659: 1, | | |
| | | | | | | | L0783: 1, L0666: 1, | | |
| | | | | | | | S0374: 1, H0520: 1, | | |
| | | | | | | | H0658: 1, H0672: 1, | | |
| | | | | | | | S0330: 1, L0743: 1, | | |
| | | | | | | | L0751: 1, L0777: 1 and | | |
| | | | | | | | H0542: 1. | | |
| | | 934527 | 237 | 29-1072 | 502 | | | | |
| 101 | HKAAR71 | 863023 | 111 | 54-977 | 376 | Gln-1 to Gln-6, | AR061: 1, AR089: 0 | | |
| | | | | | | Ser-24 to Thr-31, | H0494: 2, H0693: 2, | | |
| | | | | | | Pro-57 to Gln-63, | H0521: 2, H0580: 1, | | |
| | | | | | | Ala-96 to Met-104, | H0253: 1, H0628: 1, | | |
| | | | | | | Asn-124 to Lys-133, | H0522: 1 and H0422: 1. | | |
| | | | | | | Ser-172 to Trp-182, | | | |
| | | | | | | Ser-186 to Glu-194, | | | |
| | | | | | | Pro-286 to Pro-294. | | | |
| 102 | HLHBC30 | 910079 | 112 | 39-512 | 377 | Gln-7 to Glu-17. | AR061: 8, AR089: 5 | | |
| | | | | | | | L0456: 3, H0024: 2 | | |
| | | | | | | | and L0747: 1. | | |
| 103 | HLQDC55 | 934528 | 113 | 1-444 | 378 | Gly-19 to Ile-27, | AR061: 9, AR089: 3 | | |
| | | | | | | Thr-31 to Asp-41, | H0574: 1 and S0344: 1. | | |
| | | | | | | Asp-58 to Phe-67, | | | |
| | | | | | | Ser-79 to Lys-85, | | | |
| | | | | | | Leu-119 to Glu-127. | | | |
| 104HMCFSO2 | 969326 | 114 | 2-496 | 379 | Arg-3 to Lys-20, | AR061: 2, AR089: 0 | | | |
| | | | | | | Phe-22 to Ser-28, | L0766: 10, L0794: 7, | | |
| | | | | | | Leu-50 to Gln-57. | L0758: 7, L0805: 6, | | |
| | | | | | | | L0751: 4, L0754: 4, | | |
| | | | | | | | L0803: 3, L0483: 2, | | |
| | | | | | | | L0764: 2, L0659: 2, | | |
| | | | | | | | L0809: 2, L0790: 2, | | |
| | | | | | | | L0666: 2, L0755: 2, | | |
| | | | | | | | L0599: 2, H0170: 1, | | |
| | | | | | | | H0294: 1, H0583: 1, | | |
| | | | | | | | H0656: 1, S0282: 1, | | |
| | | | | | | | H0255: 1, S0420: 1, | | |
| | | | | | | | H0618: 1,H0688: 1, | | |
| | | | | | | | L0055: 1, S0344: 1, | | |
| | | | | | | | H0529: 1, L0761: 1, | | |
| | | | | | | | L0643: 1, L0645: 1, | | |
| | | | | | | | L0804: 1, L0806: 1, | | |
| | | | | | | | L0653: 1, L0776: 1, | | |
| | | | | | | | L0629: 1, L0636: 1, | | |
| | | | | | | | L0788: 1, L0789: 1, | | |
| | | | | | | | L0791: 1, L0665: 1, | | |
| | | | | | | | S0428: 1, H0702: 1, | | |
| | | | | | | | L0438: 1, S0330: 1, | | |
| | | | | | | | H0539: 1, H0478: 1, | | |
| | | | | | | | L0749: 1, L0750: 1, | | |
| | | | | | | | L0779: 1, L0731: 1, | | |
| | | | | | | | L0757: 1, H0665: 1 and | | |
| | | | | | | | H0423: 1. | | |
| 105 | HMEGH46 | 887791 | 115 | 1-315 | 380 | Asp-13 to Asp-19, | AR054: 29, AR051: | | |
| | | | | | | Lys-76 to Asn-83. | 12, AR061: 6, AR089: | | |
| | | | | | | | 3, AR050: 2 | | |
| | | | | | | | H0196: 1 and H0266: | | |
| | | | | | | | 1. | | |
| 106 | HMSBZ24 | 678707 | 116 | 2-322 | 381 | | AR061: 4, AR089: 2 | | |
| | | | | | | | H0331: 1, S0002: 1, | | |
| | | | | | | | H0519: 1 and L0741: 1. | | |
| 107 | HOHBN82 | 724322 | 117 | 3-629 | 382 | Asn-41 to Pro-50, | AR089: 1, AR061: 0 | | |
| | | | | | | Asp-60 to Glu-71, | S0002: 2,H0521: 2, | | |
| | | | | | | Leu-121 to Pro-130, | S0360: 1, H0123: 1, | | |
| | | | | | | Glu-139 to Thr-144, | S0250: 1, L0654: 1, | | |
| | | | | | | Asp-155 to Ser-166, | S0152: 1, L0740: 1 and | | |
| | | | | | | Gly-174 to Asp-188. | L0749: 1. | | |
| 108 | HPFCU80 | 685294 | 118 | 162-341 | 383 | | AR089: 16, AR061: 13 | | |
| | | | | | | | H0163: 3 and H0169: | | |
| | | | | | | | 1. | | |
| 109 | HPJCR33 | 966758 | 119 | 1-375 | 384 | | AR089: 2, AR061: 1 | | |
| | | | | | | | L0754: 8, L0777: 8, | | |
| | | | | | | | L0439: 5, H0266: 2, | | |
| | | | | | | | L0438: 2, H0672: 2, | | |
| | | | | | | | S0152: 2, L0745: 2, | | |
| | | | | | | | L0758: 2, H0650: 1, | | |
| | | | | | | | S0212: 1, S0045: 1, | | |
| | | | | | | | S0046: 1, H0486: 1, | | |
| | | | | | | | L0563: 1, H0051: 1, | | |
| | | | | | | | H0644: 1, H0673: 1, | | |
| | | | | | | | H0551: 1, H0269: 1, | | |
| | | | | | | | S0344: 1, L0794: 1, | | |
| | | | | | | | L0766: 1, L0803: 1, | | |
| | | | | | | | L0805: 1, L0659: 1, | | |
| | | | | | | | H0547: 1, H0519: 1, | | |
| | | | | | | | S0126: 1, H0711: 1, | | |
| | | | | | | | H0528: 1, S0028: 1, | | |
| | | | | | | | L0750: 1, L0780: 1, | | |
| | | | | | | | L0757: 1, L0588: 1, | | |
| | | | | | | | L0591: 1, S0192: 1, | | |
| | | | | | | | H0423: 1 and H0293: 1. | | |
| 110 | HSCKS55 | 1195856 | 120 | 208-1707 | 385 | Pro-26 to Pro-32, | AR089: 13, AR061: 5 | | |
| | | | | | | Arg-47 to Ala-52, | H0617: 6, H0556: 4, | | |
| | | | | | | Thr-58 to Gln-70, | H0305: 3, S0007: 3, | | |
| | | | | | | Ala-72 to Thr-79. | H0618: 3, H0521: 3, | | |
| | | | | | | | L0439: 3, H0672: 2, | | |
| | | | | | | | L0754: 2, L0600: 2, | | |
| | | | | | | | S0442: 1, S0354: 1, | | |
| | | | | | | | S0358: 1, S0045: 1, | | |
| | | | | | | | S0046: 1, S0222: 1, | | |
| | | | | | | | H0438: 1, H0587: 1, | | |
| | | | | | | | H0599: 1, H0036: 1, | | |
| | | | | | | | H0597: 1, H0530: 1, | | |
| | | | | | | | L0118: 1, H0570: 1, | | |
| | | | | | | | H0023: 1, S0250: 1, | | |
| | | | | | | | H0039: 1, H0181: 1, | | |
| | | | | | | | H0674: 1, S0036: 1, | | |
| | | | | | | | L0351: 1, T0041: 1, | | |
| | | | | | | | H0494: 1, H0509: 1, | | |
| | | | | | | | L0769: 1, L0761: 1, | | |
| | | | | | | | L0764: 1, L0768: 1, | | |
| | | | | | | | L0806: 1, H0519: 1, | | |
| | | | | | | | H0593: 1, H0670: 1, | | |
| | | | | | | | H0660: 1, S3014: 1, | | |
| | | | | | | | L0741: 1, L0779: 1 and | | |
| | | | | | | | H0667: 1. | | |
| | | 961074 | 238 | 703-1704 | 503 | Pro-72 to Thr-82, | | | |
| | | | | | | Asn-87 to Gln-96, | | | |
| | | | | | | Arg-103 to Ala-111, | | | |
| | | | | | | Asp-158 to Gly-165. | | | |
| 111 | HSPBQ12 | 1191772 | 121 | 103-1722 | 386 | Asp-25 to Asp-31. | AR089: 2, AR061: 1 | | |
| | | | | | | | L0766: 19, L0439: 9, | | |
| | | | | | | | L0803: 7, L0740: 7, | | |
| | | | | | | | L0752: 7, L0770: 5, | | |
| | | | | | | | L0659: 5, L0731: 5, | | |
| | | | | | | | L0805: 4, L0777: 4, | | |
| | | | | | | | H0657: 3, H0373: 3, | | |
| | | | | | | | L0804: 3, S0152: 3, | | |
| | | | | | | | L0748: 3, L0749: 3, | | |
| | | | | | | | L0779: 3, H0650: 2, | | |
| | | | | | | | L0471: 2, S6028: 2, | | |
| | | | | | | | H0032: 2, L0783: 2, | | |
| | | | | | | | L0438: 2, H0521: 2, | | |
| | | | | | | | H0478: 2, L0744: 2, | | |
| | | | | | | | L0747: 2, L0750: 2, | | |
| | | | | | | | L0485: 2, S0424: 2, | | |
| | | | | | | | S0134: 1, S0354: 1, | | |
| | | | | | | | S0358: 1, H0580: 1, | | |
| | | | | | | | S0222: 1, H0013: 1, | | |
| | | | | | | | L0021: 1, H0575: 1, | | |
| | | | | | | | H0050: 1, H0014: 1, | | |
| | | | | | | | H0051: 1, H0031: 1, | | |
| | | | | | | | H0553: 1, H0165: 1, | | |
| | | | | | | | H0551: 1, H0509: 1, | | |
| | | | | | | | H0132: 1, H0652: 1, | | |
| | | | | | | | S0002: 1, H0529: 1, | | |
| | | | | | | | L0763: 1, L0772: 1, | | |
| | | | | | | | L0372: 1, L0771: 1, | | |
| | | | | | | | L0521: 1, L0662: 1, | | |
| | | | | | | | L0768: 1, L0386: 1, | | |
| | | | | | | | L0388: 1, L0774: 1, | | |
| | | | | | | | L0775: 1, L0655: 1, | | |
| | | | | | | | L0782: 1, L0809: 1, | | |
| | | | | | | | L0787: 1, L0789: 1, | | |
| | | | | | | | L0663: 1, L0664: 1, | | |
| | | | | | | | H0144: 1, L0352: 1, | | |
| | | | | | | | H0520: 1, H0435: 1, | | |
| | | | | | | | H0659: 1, H0658: 1, | | |
| | | | | | | | H0648: 1, H0672: 1, | | |
| | | | | | | | S0378: 1, S0380: 1, | | |
| | | | | | | | S0044: 1, L0780: 1, | | |
| | | | | | | | L0757: 1, L0758: 1 and | | |
| | | | | | | | H0543: 1. | | |
| | | 884004 | 239 | 91-1287 | 504 | | | | |
| 112 | HSYBX32 | 909846 | 122 | 46-228 | 387 | | AR061: 0, AR089: 0 | 7q22-q31.1 | 126650, |
| | | | | | | | H0046: 34, L0731: 5, | | 126650, |
| | | | | | | | L0534: 4, L0769: 4, | | 150240, |
| | | | | | | | H0521: 4, S0356: 3, | | 154276, |
| | | | | | | | L0800: 3, L0794: 3, | | 173360, |
| | | | | | | | L0439: 3, L0749: 3, | | 173360, |
| | | | | | | | L0752: 3, L0759: 3, | | 180105, |
| | | | | | | | LO562: 2, H0486: 2, | | 222800, |
| | | | | | | | L0803: 2, L0805: 2, | | 246900, |
| | | | | | | | L0809: 2, L0789: 2, | | 602136, |
| | | | | | | | L0744: 2, L0485: 2, | | 602136, |
| | | | | | | | H0556: 1, H0657: 1, | | 602136, |
| | | | | | | | H0637: 1, H0580: 1, | | 602447 |
| | | | | | | | H0208: 1, H0261: 1, | | |
| | | | | | | | H0609: 1, H0455: 1, | | |
| | | | | | | | H0600: 1, H0586: 1, | | |
| | | | | | | | H0331: 1, H0635: 1, | | |
| | | | | | | | H0618: 1, H0544: 1, | | |
| | | | | | | | H0009: 1, H0050: 1, | | |
| | | | | | | | H0620: 1, H0288: 1, | | |
| | | | | | | | S0312: 1, S0314: 1, | | |
| | | | | | | | H0252: 1, H0688: 1, | | |
| | | | | | | | H0644: 1, S0366: 1, | | |
| | | | | | | | H0135: 1, H0063: 1, | | |
| | | | | | | | H0087: 1, H0551: 1, | | |
| | | | | | | | H0264: 1, S0002: 1, | | |
| | | | | | | | L0639: 1, L0771: 1, | | |
| | | | | | | | L0648: 1, L0766: 1, | | |
| | | | | | | | L0650: 1, L0378: 1, | | |
| | | | | | | | L0655: 1, H0699: 1, | | |
| | | | | | | | H0660: 1, L0743: 1, | | |
| | | | | | | | L0750: 1, L0777: 1, | | |
| | | | | | | | L0758: 1, L0097: 1, | | |
| | | | | | | | S0194: 1 and H0543: 1. | | |
| 113 | HTAHB43 | 909845 | 123 | 18-914 | 388 | Gln-8 to Glu-13. | AR089: 1, AR061: 0 | | |
| | | | | | | | H0046: 34, L0731: 5, | | |
| | | | | | | | L0534: 4, L0769: 4, | | |
| | | | | | | | H0521: 4, S0356: 3, | | |
| | | | | | | | L0800: 3, L0794: 3, | | |
| | | | | | | | L0439: 3, L0749: 3, | | |
| | | | | | | | L0752: 3, L0759: 3, | | |
| | | | | | | | L0562: 2, H0486: 2, | | |
| | | | | | | | L0803: 2, L0805: 2, | | |
| | | | | | | | L0809: 2, L0789: 2, | | |
| | | | | | | | L0744: 2, L0485: 2, | | |
| | | | | | | | H0556: 1, H0657: 1, | | |
| | | | | | | | H0637: 1, H0580: 1, | | |
| | | | | | | | H0208: 1, H0261: 1, | | |
| | | | | | | | H0609: 1, H0455: 1, | | |
| | | | | | | | H0600: 1, H0586: 1, | | |
| | | | | | | | H0331: 1, H0635: 1, | | |
| | | | | | | | H0618: 1, H0544: 1, | | |
| | | | | | | | H0009: 1, H0050: 1, | | |
| | | | | | | | H0620: 1, H0288: 1, | | |
| | | | | | | | S0312: 1, S0314: 1, | | |
| | | | | | | | H0252: 1, H0688: 1, | | |
| | | | | | | | H0644: 1, S0366: 1, | | |
| | | | | | | | H0135: 1, H0063: 1, | | |
| | | | | | | | H0087: 1, H0551: 1, | | |
| | | | | | | | H0264: 1, S0002: 1, | | |
| | | | | | | | L0639: 1, L0771: 1, | | |
| | | | | | | | L0648: 1, L0766: 1, | | |
| | | | | | | | L0650: 1, L0378: 1, | | |
| | | | | | | | L0655: 1, H0699: 1, | | |
| | | | | | | | H0660: 1, L0743: 1, | | |
| | | | | | | | L0750: 1, L0777: 1, | | |
| | | | | | | | L0758: 1, L0097: 1, | | |
| | | | | | | | S0194: 1 and H0543: 1. | | |
| 114 | HTBAB41 | 867287 | 124 | 11-178 | 389 | Lys-1 to Asp-7, | AR089: 30, AR061: 8 | | |
| | | | | | | Gln-47 to Arg-53. | S0044: 2, L0748: 2, | | |
| | | | | | | | H0392: 1, H0075: 1, | | |
| | | | | | | | L0770: 1 and H0519: 1. | | |
| 115 | HTEDF74 | 522982 | 125 | 3-575 | 390 | Pro-20 to Trp-36, | AR061: 3, AR089: 2 | | |
| | | | | | | Arg-39 to Pro-45, | L0731: 2, H0341: 1, | | |
| | | | | | | Gly-62 to Glu-69, | H0392: 1, H0038: 1, | | |
| | | | | | | Asp-77 to Lys-82, | H0641: 1, L0803: 1 and | | |
| | | | | | | Pro-87 to Ala-93. | H0445: 1. | | |
| 116 | HTEFO45 | 1150975 | 126 | 923-387 | 391 | | AR061: 6, AR089: 3 | | |
| | | | | | | | L0758: 2, S0222: 1, | | |
| | | | | | | | H0038: 1 and H0539: 1. | | |
| | | 723446 | 240 | 3-482 | 505 | Gln-6 to Lys-14, | | | |
| | | | | | | Leu-68 to Glu-90. | | | |
| 117 | HTNGF69 | 1151100 | 127 | 568-266 | 392 | Ser-1 to Gly-23, | AR061: 3, AR089: 2 | | |
| | | | | | | Gly-85 to Leu-91. | L0758: 3, L0666: 2, | | |
| | | | | | | | L0751: 2, L0777: 2, | | |
| | | | | | | | H0663: 1, L0021: 1, | | |
| | | | | | | | H0309: 1, H0688: 1, | | |
| | | | | | | | H0617: 1, H0477: 1, | | |
| | | | | | | | L0766: 1, L0775: 1, | | |
| | | | | | | | L0367: 1, L0789: 1, | | |
| | | | | | | | L0663: 1, L0438: 1, | | |
| | | | | | | | L0749: 1, L0779: 1, | | |
| | | | | | | | L0757: 1 and S0456: 1. | | |
| | | 933614 | 241 | 483-785 | 506 | Ser-1 to Gly-23, | | | |
| | | | | | | Gly-85 to Leu-91. | | | |
| 118 | HTXRA13 | 959622 | 128 | 3-1091 | 393 | Ser-1 to Ser-6, | AR061: 1, AR089: 0 | | |
| | | | | | | Thr-14 to Gly-28. | H0556: 2, L0756: 2, | | |
| | | | | | | | H0423: 2, S0134: 1, | | |
| | | | | | | | H0580: 1, H0271: 1, | | |
| | | | | | | | T0006: 1, H0264: 1, | | |
| | | | | | | | H0560: 1, H0641: 1, | | |
| | | | | | | | S0142: 1, L0805: 1, | | |
| | | | | | | | L0809: 1, L0789: 1, | | |
| | | | | | | | H0555: 1, L0780: 1 and | | |
| | | | | | | | S0031: 1. | | |
| 119 | HUSHB54 | 928054 | 129 | 125-355 | 394 | | AR089: 1, AR061: 0 | | |
| | | | | | | | H0056: 3, H0437: 1, | | |
| | | | | | | | H0050: 1 and S0002: 1. | | |
| 120 | HWHQC94 | 715096 | 1301-627 | 395 | Trp-62 to Pro-67. | AR089: 2, AR061: 1 | | | |
| | | | | | | | L0665: 4, S0132: 2, | | |
| | | | | | | | L0438: 2, L0439: 2, | | |
| | | | | | | | L0596: 2, H0542: 2, | | |
| | | | | | | | H0543: 2, S0114: 1, | | |
| | | | | | | | H0614: 1, H0592: 1, | | |
| | | | | | | | H0587: 1, S0280: 1, | | |
| | | | | | | | H0253: 1, H0581: 1, | | |
| | | | | | | | H0457: 1, H0012: 1, | | |
| | | | | | | | H0083: 1, H0687: 1, | | |
| | | | | | | | H0290: 1, H0622: 1, | | |
| | | | | | | | H0135: 1, S0150: 1, | | |
| | | | | | | | L0796: 1, L0646: 1, | | |
| | | | | | | | L0643: 1, L0764: 1, | | |
| | | | | | | | L0773: 1, L0649: 1, | | |
| | | | | | | | L0659: 1, L0663: 1, | | |
| | | | | | | | H0658: 1, H0555: 1, | | |
| | | | | | | | H0478: 1, L0752: 1, | | |
| | | | | | | | L0599: 1 and H0506: 1. | | |
| 121 | HWLHK29 | 1195515 | 131 | 3-590 | 396 | Gln-18 to Thr-26, | AR089: 15, AR061: 5 | | |
| | | | | | | Ser-148 to Phe-157. | L0754: 5, L0755: 5, | | |
| | | | | | | | S0354: 3, L0483: 3, | | |
| | | | | | | | H0648: 3, L0777: 3, | | |
| | | | | | | | S0374: 2, L0751: 2, | | |
| | | | | | | | L0758: 2, L0605: 2, | | |
| | | | | | | | L0362: 2, H0543: 2, | | |
| | | | | | | | S0114: 1, S0358: 1, | | |
| | | | | | | | H0411: 1, H0575: 1, | | |
| | | | | | | | L0105: 1, H0263: 1, | | |
| | | | | | | | H0596: 1, H0510: 1, | | |
| | | | | | | | S0003: 1, H0166: 1, | | |
| | | | | | | | H0169: 1, H0090: 1, | | |
| | | | | | | | H0059: 1, S0440: 1, | | |
| | | | | | | | L0373: 1, L0372: 1, | | |
| | | | | | | | L0800: 1, L0662: 1, | | |
| | | | | | | | L0794: 1, L0649: 1, | | |
| | | | | | | | L0803: 1, L0804: 1, | | |
| | | | | | | | L0659: 1, L0783: 1, | | |
| | | | | | | | L0809: 1, L0789: 1, | | |
| | | | | | | | L0790: 1, L0666: 1, | | |
| | | | | | | | L0665: 1, S0378: 1, | | |
| | | | | | | | L0602: 1, H0436: 1, | | |
| | | | | | | | L0779: 1, L0780: 1, | | |
| | | | | | | | S0434: 1, S0196: 1 and | | |
| | | | | | | | S0446: 1. | | |
| | | 876064 | 242 | 3-491 | 507 | Gln-18 to Thr-26. | | | |
| 122 | HYABL89 | 786157 | 132 | 246-416 | 397 | | AR089: 1, AR061: 1 | | |
| | | | | | | | S0114: 1, H0583: 1 and | | |
| | | | | | | | H0013: 1. | | |
| 123 | HAIDO94 | 1104652 | 133 | 146-358 | 398 | Arg-17 to Gly-50, | AR089: 6, AR061: 4 | | |
| | | | | | | Asn-52 to Ser-59, | S0132: 1 | | |
| | | | | | | Glu-61 to Val-71. | | | |
| | | 793201 | 243 | 231-1 | 508 | Thr-5 to His-14. | | | |
| 124 | HBJIH60 | 1151461 | 134 | 650-420 | 399 | Gly-45 to Cys-51. | AR089: 35, AR061: 8 | | |
| | | | | | | | H0318: 1, L0520: 1 | | |
| | | | | | | | and L0779: 1. | | |
| | | 930448 | 244 | 1-234 | 509 | Pro-35 to Pro-42. | | | |
| 125 | HCE3P22 | 1151160 | 135 | 378-710 | 400 | Gly-10 to Asp-16. | AR061: 6, AR089: 3 | | |
| | | | | | | | L0439: 3, H0052: 2, | | |
| | | | | | | | L0758: 2, S0222: 1, | | |
| | | | | | | | S0346: 1, S0388: 1 and | | |
| | | | | | | | L0792: 1. | | |
| | | 674862 | 245 | 46-285 | 510 | Pro-20 to Phe-38, | | | |
| | | | | | | Gly-74 to Gly-79. | | | |
| 126 | HCE5L27 | 1104541 | 136 | 481-2 | 401 | | AR061: 7, AR089: 3 | | |
| | | | | | | | H0581: 1, H0052: 1 | | |
| | | | | | | | and H0271: 1. | | |
| | | 574778 | 246 | 3-122 | 511 | Arg-6 to Ala-11. | | | |
| 127 | HCHNW48 | 1103908 | 137 | 551-84 | 402 | Arg-46 to Gln-54, | AR061: 1, AR089: 1 | | |
| | | | | | | Leu-66 to Ala-72, | H0484: 1 and L0589: | | |
| | | | | | | Cys-78 to Arg-86. | 1. | | |
| | | 862478 | 247 | 122-325 | 512 | Lys-1 to Ser-13. | | | |
| 128 | HCUEU74 | 576538 | 138 | 2-118 | 403 | | AR089: 4, AR061: 3 | | |
| | | | | | | | L0740: 25, L0766: 5, | | |
| | | | | | | | L0157: 4, L0655: 4, | | |
| | | | | | | | H0402: 3, H0650: 2, | | |
| | | | | | | | H0657: 2, H0656: 2, | | |
| | | | | | | | H0581: 2, H0306: 1, | | |
| | | | | | | | L0005: 1, H0318: 1, | | |
| | | | | | | | H0046: 1, H0328: 1, | | |
| | | | | | | | S0038: 1, H0429: 1, | | |
| | | | | | | | H0560: 1, S0344: 1, | | |
| | | | | | | | L0761: 1, L0794: 1, | | |
| | | | | | | | L0789: 1, S0053: 1, | | |
| | | | | | | | H0689: 1, H0134: 1, | | |
| | | | | | | | L0779: 1, L0777: 1 and | | |
| | | | | | | | H0445: 1. | | |
| 129 | HDPCM62 | 454740 | 139 | 137-382 | 404 | His-1 to Asn-12, | AR061: 159, AR089: 1p34.l-p32 | 120550, | |
| | | | | | | Pro-14 to Pro-27, | 121 | | 120570, |
| | | | | | | Asn-33 to Ser-39, | H0521: 1 | | 120575, |
| | | | | | | Pro-41 to Asn-46, | | 120950, | |
| | | | | | | Pro-74 to Pro-82. | | 120960, | |
| | | | | | | | | | 121800, |
| | | | | | | | | | 130500, |
| | | | | | | | | | 133200, |
| | | | | | | | | | 138140, |
| | | | | | | | | | 171760, |
| | | | | | | | | | 171760, |
| | | | | | | | | | 178300, |
| | | | | | | | | | 187040, |
| | | | | | | | | | 255800, |
| | | | | | | | | | 600101, |
| | | | | | | | | | 600650, |
| | | | | | | | | | 600650, |
| | | | | | | | | | 600722, |
| | | | | | | | | | 600722 |
| 130 | HDPYA61 | 1226158 | 140 | 2-2266 | 405 | Tyr-58 to Asn-67. | AR061: 1, AR089: 1 | | |
| | | | | | | | H0552: 2, H0581: 1, | | |
| | | | | | | | H0494: 1, H0625: 1, | | |
| | | | | | | | S0002: 1, H0435: 1, | | |
| | | | | | | | H0521: 1 and L0731: 1. | | |
| | | 741586 | 248 | 1-354 | 513 | Lys-5 to Ala-10, | | | |
| | | | | | | Arg-37 to Gln-46, | | | |
| | | | | | | Gln-106 to Asp-111. | | | |
| 131 | HDSAK19 | 1124584 | 141 | 1066-1551 | 406 | Lys-5 to Gly-12, | AR061: 8, AR089: 3 | | |
| | | | | | | Ala-20 to Met-26, | H0615: 4, L0756: 3, | | |
| | | | | | | Gly-49 to Ser-55, | H0265: 2, H0013: 2, | | |
| | | | | | | Ser-73 to Ala-106, | S3014: 2, L0480: 2, | | |
| | | | | | | Pro-121 to Ser-126, | H0556: 1, H0341: 1, | | |
| | | | | | | Ala-149 to Trp-154. | S0282: 1, H0329: 1, | | |
| | | | | | | | H0549: 1, H0574: 1, | | |
| | | | | | | | T0039: 1, H0599: 1, | | |
| | | | | | | | S0019: 1, S0051: 1, | | |
| | | | | | | | H0030: 1, H0032: 1, | | |
| | | | | | | | S0036: 1, H0494: 1, | | |
| | | | | | | | S0344: 1, S0002: 1, | | |
| | | | | | | | L0646: 1, L0803: 1, | | |
| | | | | | | | S0152: 1, S0190: 1, | | |
| | | | | | | | S0206: 1, L0777: 1 and | | |
| | | | | | | | S0031: 1. | | |
| | | 933455 | 249 | 1064-1549 | 514 | Lys-5 to Gly-12, | | | |
| | | | | | | Ala-20 to Met-26, | | | |
| | | | | | | Gly-49 to Ser-55, | | | |
| | | | | | | Pro-57 to Tyr-63. | | | |
| 132 | HDTJI37 | 1193037 | 142 | 952-596 | 407 | Lys-8 to Glu-15, | AR089: 46, AR061: 7 | | |
| | | | | | | Lys-26 to Tyr-34, | H0486: 2, L0663: 1 | | |
| | | | | | | Arg-62 to Gly-67, | and L0754: 1. | | |
| | | | | | | Gly-71 to Ile-78, | | | |
| | | | | | | Arg-81 to Gly-96. | | | |
| | | 799834 | 250 | 311-553 | 515 | Glu-1 to Thr-6, | | | |
| | | | | | | Leu-34 to Ala-40. | | | |
| 133 | HE2IO96 | 796075 | 143 | 38-406 | 408 | Asp-15 to Ser-20, | AR061: 10, AR089: 3 | | |
| | | | | | | Pro-27 to Leu-36, | H0170: 1 and L0439: | | |
| | | | | | | Met-44 to Gly-49, | 1. | | |
| | | | | | | Asn-69 to Lys-75. | | | |
| 134 | HEPCP91 | 1142257 | 144 | 3-1199 | 409 | Gln-1 to Asp-14. | AR089: 62, AR061: 36 | | |
| | | | | | | | L0770: 4, L0749: 3, | | |
| | | | | | | | H0253: 2, L0803: 2, | | |
| | | | | | | | L0809: 2, L0731: 2, | | |
| | | | | | | | H0441: 1, H0244: 1, | | |
| | | | | | | | H0618: 1, S0010: 1, | | |
| | | | | | | | H0150: 1, H0009: 1, | | |
| | | | | | | | S0050: 1, H0033: 1, | | |
| | | | | | | | H0673: 1, L0769: 1, | | |
| | | | | | | | L0638: 1, L0767: 1, | | |
| | | | | | | | L0794: 1, L0805: 1, | | |
| | | | | | | | L0776: 1, L0789: 1, | | |
| | | | | | | | H0144: 1, H0555: 1 and | | |
| | | | | | | | L0757: 1. | | |
| | | 679234 | 251 | 1-549 | 516 | Ile-45 to Pro-50, | | | |
| | | | | | | Glu-54 to Lys-59. | | | |
| 135 | HFGAL44 | 1150869 | 145 | 352-555 | 410 | Lys-62 to Ser-67. | AR089: 1, AR061: 1 | | |
| | | | | | | | 50376: 1,H0178: 1, | | |
| | | | | | | | H0030: 1,L0769: 1, | | |
| | | | | | | | L0643: 1, L0750: 1 and | | |
| | | | | | | | L0756: 1. | | |
| | | 715764 | 252 | 53-178 | 517 | Gly-5 to Tyr-10. | | | |
| 136 | HFIUM16 | 661845 | 146 | 135-347 | 411 | His-1 to Asn-12, | AR061: 746, AR089: | 1p34.1-p32 | 120550, |
| | | | | | | Pro-14 to Pro-27, | 449 | | 120570, |
| | | | | | | Asn-33 to Ser-39. | | | 120575, |
| | | | | | | | | | 120950, |
| | | | | | | | | | 120960, |
| | | | | | | | | | 121800, |
| | | | | | | | | | 130500, |
| | | | | | | | | | 133200, |
| | | | | | | | | | 138140, |
| | | | | | | | | | 171760, |
| | | | | | | | | | 171760, |
| | | | | | | | | | 178300, |
| | | | | | | | | | 187040, |
| | | | | | | | | | 255800, |
| | | | | | | | | | 600101, |
| | | | | | | | | | 600650, |
| | | | | | | | | | 600650, |
| | | | | | | | | | 600722, |
| | | | | | | | | | 600722 |
| 137 | HFPAC33 | 1024217 | 147 | 180-602 | 412 | Ser-14 to Ala-23, | AR061: 6, AR089: 5 | | |
| | | | | | | Pro-26 to Val-32. | L0752: 2, S0007: 1, | | |
| | | | | | | | S6016: 1, H0014: 1, | | |
| | | | | | | | H0288: 1, S0150: 1 and | | |
| | | | | | | | L0438: 1. | | |
| | | 537724 | 253 | 180-602 | 518 | Ser-14 to Ala-23, | | | |
| | | | | | | Pro-26 to Val-32. | | | |
| 138 | HFXBJ04 | 1068099 | 148 | 344-3 | 413 | | AR089: 1, AR061: 1 | | |
| | | | | | | | S0150: 2 and S0001: 1. | | |
| | | 854511 | 254 | 130-357 | 519 | Glu-37 to Thr-42. | | | |
| 139 | HHENY30 | 1177596 | 149 | 1-633 | 414 | Thr-1 to Cys-9, | AR089: 2, AR061: 2 | | |
| | | | | | | Pro-32 to Gly-45, | H0288: 2, H0341: 1, | | |
| | | | | | | Glu-49 to Glu-73. | H0266: 1, H0292: 1, | | |
| | | | | | | | L0483: 1, H0436: 1, | | |
| | | | | | | | S0390: 1 and H0543: 1. | | |
| | | 953829 | 255 | 1-519 | 520 | Lys-1 to Arg-7, | | | |
| | | | | | | Asp-9 to Gly-49, | | | |
| | | | | | | Glu-106 to Arg-118. | | | |
| 140 | HHFGV79 | 573532 | 150 | 47-217 | 415 | | AR089: 11, AR061: 8 | | |
| | | | | | | | H0156: 1, H0050: 1 | | |
| | | | | | | | and L0595: 1. | | |
| 141 | HHSAL11 | 967685 | 151 | 142-459 | 416 | Glu-1 to Gly-8, | AR061: 427, AR089: | | |
| | | | | | | Ala-10 to Pro-26. | 240 | | |
| | | | | | | | S0051: 1 and L0369: 1. | | |
| 142 | HKADH21 | 1104904 | 152 | 2-574 | 417 | Ser-19 to Arg-38, | AR089: 6, AR061: 2 | | |
| | | | | | | Gly-76 to Gly-84, | H0266: 1, H0494: 1 | | |
| | | | | | | Arg-164 to Lys-175. | and S0150: 1. | | |
| | | 670821 | 256 | 32-448 | 521 | Gln-1 to Arg-6, | | | |
| | | | | | | Pro-11 to Trp-22. | | | |
| 143 | HLDON90 | 1151492 | 153 | 574-269 | 418 | Ser-4 to Pro-10. | AR089: 7, AR061: 3 | | |
| | | | | | | | H0622: 2, L0535: 2, | | |
| | | | | | | | H0510: 1, H0039: 1, | | |
| | | | | | | | L0369: 1, L0748: 1 and | | |
| | | | | | | | L0749: 1. | | |
| | | 788891 | 257 | 2-145 | 522 | Lys-1 to Arg-10. | | | |
| 144 | HLTAZ78 | 1150875 | 154 | 3-1100 | 419 | Asp-80 to Glu-102, | AR061: 46, AR089: 33 | | |
| | | | | | | Thr-143 to Gln-154, | L0731: 9, L0794: 7, | | |
| | | | | | | Tyr-184 to Ser-190, | L0749: 6, L0439: 5, | | |
| | | | | | | Glu-198 to Ile-205, | L0662: 4, L0596: 3, | | |
| | | | | | | Pro-271 to Asp-276, | L0717: 2, H0591: 2, | | |
| | | | | | | Lys-342 to Ser-348. | L0761: 2, L0766: 2, | | |
| | | | | | | | L0803: 2, L0659: 2, | | |
| | | | | | | | L0663: 2, H0436: 2, | | |
| | | | | | | | L0748: 2, L0747: 2, | | |
| | | | | | | | L0779: 2, L0755: 2, | | |
| | | | | | | | L0758: 2, L0759: 2, | | |
| | | | | | | | L0591: 2, L0581: 2, | | |
| | | | | | | | H0423: 2, H0170: 1, | | |
| | | | | | | | S0282: 1, H0661: 1, | | |
| | | | | | | | H0638: 1, S0418: 1, | | |
| | | | | | | | S0356: 1, S0360: 1, | | |
| | | | | | | | S0046: 1, H0393: 1, | | |
| | | | | | | | H0486: 1, H0147: 1, | | |
| | | | | | | | H0318: 1, L0041: 1, | | |
| | | | | | | | H0562: 1, H0049: 1, | | |
| | | | | | | | H0266: 1, H0124: 1, | | |
| | | | | | | | H0598: 1, H0090: 1, | | |
| | | | | | | | L0475: 1, H0561: 1, | | |
| | | | | | | | S0382: 1, S0440: 1, | | |
| | | | | | | | H0509: 1, H0641: 1, | | |
| | | | | | | | S0002: 1, S0426: 1, | | |
| | | | | | | | L0770: 1, L0769: 1, | | |
| | | | | | | | L0764: 1, L0804: 1, | | |
| | | | | | | | L0650: 1, L0805: 1, | | |
| | | | | | | | L0776: 1, L0809: 1, | | |
| | | | | | | | L0789: 1, L0665; 1, | | |
| | | | | | | | H0520: 1, H0519: 1, | | |
| | | | | | | | H0666: 1, S0146: 1, | | |
| | | | | | | | S3014: 1, L0754: 1, | | |
| | | | | | | | L0757: 1, L0480: 1, | | |
| | | | | | | | L0608: 1, S0026: 1, | | |
| | | | | | | | S0192: 1 and H0542: 1. | | |
| | | 946233 | 258 | 3-569 | 523 | | | | |
| 145 | HMMAL17 | 662379 | 155 | 157-402 | 420 | His-1 to Asn-12, | AR061: 876, AR089: 1p34.1-p32 | 120550, | |
| | | | | | | Pro-14 to Pro-27, | 492 | | 120570, |
| | | | | | | Asn-33 to Ser-39. | | 120575, | |
| | | | | | | | | | 120950, |
| | | | | | | | | | 120960, |
| | | | | | | | | | 121800, |
| | | | | | | | | | 130500, |
| | | | | | | | | | 133200, |
| | | | | | | | | | 138140, |
| | | | | | | | | | 171760, |
| | | | | | | | | | 171760, |
| | | | | | | | | | 178300, |
| | | | | | | | | | 187040, |
| | | | | | | | | | 255800, |
| | | | | | | | | | 600101, |
| | | | | | | | | | 600650, |
| | | | | | | | | | 600650, |
| | | | | | | | | | 600722, |
| | | | | | | | | | 600722 |
| 146 | HOFMB78 | 1193496 | 156 | 934-29 | 421 | Leu-30 toV al-35, | AR089: 26, AR061: 10 | | |
| | | | | | | Arg-70 to Ala-76, | H0415: 8 and H0414: | | |
| | | | | | | Gln-129 to Val-134, | 2. | | |
| | | | | | | Pro-136 to Leu-144, | | | |
| | | | | | | Glu-280 to Phe-298. | | | |
| | | 572941 | 259 | 1-399 | 524 | Arg-10 to Lys-23. | | | |
| 147 | HSDAG13 | 968438 | 157 | 3-212 | 422 | | AR089: 1, AR061: 1 | | |
| | | | | | | | S0031: 3 and S0278: 1. | | |
| 148 | HSOAM03 | 1103422 | 158 | 513-683 | 423 | | AR089: 8, AR061: 7 | | |
| | | | | | | | H0625: 1, L0803: 1 | | |
| | | | | | | | and H0343: 1. | | |
| | | 925006 | 260 | 255-52 | 525 | Asn-1 to Arg-11, | | | |
| | | | | | | Leu-33 to Ser-41, | | | |
| | | | | | | Tyr-58 to Trp-66. | | | |
| 149 | HT4CL71 | 997265 | 159 | 759-1 | 424 | | AR050: 9, AR051: 9, | | |
| | | | | | | | AR089: 2, AR061: 2, | | |
| | | | | | | | AR054: 1 | | |
| | | | | | | | H0585: 17, L0438: 10, | | |
| | | | | | | | L0439: 8, H0141: 6, | | |
| | | | | | | | H0617: 6, H0539: 5, | | |
| | | | | | | | L0777: 4, H0618: 3, | | |
| | | | | | | | H0253: 3, H0052: 3, | | |
| | | | | | | | H0545: 3, H0009: 3, | | |
| | | | | | | | H0620: 3, H0494: 3, | | |
| | | | | | | | L0769: 3, L0659: 3, | | |
| | | | | | | | L0758: 3, H0624: 2, | | |
| | | | | | | | H0254: 2, S0045: 2, | | |
| | | | | | | | H0619: 2, H0441: 2, | | |
| | | | | | | | H0013: 2, H0051: 2, | | |
| | | | | | | | H0038: 2, H0100: 2, | | |
| | | | | | | | L0794: 2, L0803: 2, | | |
| | | | | | | | L0809: 2, H0672: 2, | | |
| | | | | | | | L0355: 2, S0028: 2, | | |
| | | | | | | | L0745: 2, L0749: 2, | | |
| | | | | | | | L0779: 2, L0780: 2, | | |
| | | | | | | | L0601: 2, S0040: 1, | | |
| | | | | | | | H0650: 1, S0212: 1, | | |
| | | | | | | | H0255: 1, S0354: 1, | | |
| | | | | | | | S0358: 1, H0580: 1, | | |
| | | | | | | | H0550: 1, S0222: 1, | | |
| | | | | | | | H0497: 1, H0333: 1, | | |
| | | | | | | | H0642: 1, H0427: 1, | | |
| | | | | | | | S0010: 1, H0327: 1, | | |
| | | | | | | | H0544: 1, L0471: 1, | | |
| | | | | | | | S0051: 1, T0010: 1, | | |
| | | | | | | | H0687: 1, S0003: 1, | | |
| | | | | | | | H0688: 1, H0622: 1, | | |
| | | | | | | | H0553: 1, H0606: 1, | | |
| | | | | | | | H0032: 1, H0135: 1, | | |
| | | | | | | | H0163: 1, H0087: 1, | | |
| | | | | | | | H0561: 1, H0641: 1, | | |
| | | | | | | | L0373: 1, L0764: 1, | | |
| | | | | | | | L0774: 1, L0806: 1, | | |
| | | | | | | | L0653: 1, L0776: 1, | | |
| | | | | | | | L0661: 1, L0792: 1, | | |
| | | | | | | | L0666: 1, L0665: 1, | | |
| | | | | | | | H0689: 1, H0682: 1, | | |
| | | | | | | | H0658: 1, H0670: 1, | | |
| | | | | | | | H0521: 1, H0576: 1, | | |
| | | | | | | | L0741: 1, L0740: 1, | | |
| | | | | | | | L0747: 1, L0750: 1, | | |
| | | | | | | | L0731: 1, H0445: 1, | | |
| | | | | | | | L0594: 1, S0192: 1, | | |
| | | | | | | | H0543: 1, S0042: 1 and | | |
| | | | | | | | H0352: 1. | | |
| | | 702171 | 261 | 126-347 | 526 | Thr-11 to Gly-18, | | | |
| | | | | | | Leu-30 to Gly-43, | | | |
| | | | | | | Ala-53 to Ser-62. | | | |
| | | 715601 | 262 | 2-496 | 527 | Glu-26 to Gly-31. | | | |
| | | 761579 | 263 | 549-749 | 528 | Asn-1 to Ile-9. | | | |
| | | 954685 | 264 | 2-451 | 529 | Gly-60 to Ala-70, | | | |
| | | | | | | Gly-96 to Lys-103. | | | |
| 150 | HTDAB58 | 1124511 | 160 | 956-585 | 425 | Arg-4 to Ala-10, | AR089: 0, AR061: 0 | | |
| | | | | | | Arg-17 to Lys-34, | L0747: 5, L0758: 5, | | |
| | | | | | | Asn-102 to Arg-118. | H0483: 2, L0748: 2, | | |
| | | | | | | | L0750: 2, L0756: 2, | | |
| | | | | | | | L0786: 2, L0605: 2, | | |
| | | | | | | | H0170: 1, H0341: 1, | | |
| | | | | | | | L0005: 1, H0156: 1, | | |
| | | | | | | | H0318: 1, H0327: 1, | | |
| | | | | | | | H0123: 1, H0553: 1, | | |
| | | | | | | | S0366: 1, H0400: 1, | | |
| | | | | | | | H0135: 1, H0477: 1, | | |
| | | | | | | | H0059: 1, L0351: 1, | | |
| | | | | | | | S0144: 1, L0638: 1, | | |
| | | | | | | | L0662: 1, L0803: 1, | | |
| | | | | | | | L0804: 1, L0651: 1, | | |
| | | | | | | | L0805: 1, L0776: 1, | | |
| | | | | | | | L0512: 1, L0809: 1, | | |
| | | | | | | | L0789: 1, L0790: 1, | | |
| | | | | | | | H0539: 1, H0555: 1, | | |
| | | | | | | | S3014: 1 and L0749: 1. | | |
| | | 915723 | 265 | 494-793 | 530 | | | | |
| 151 | HTJAC60 | 1219940 | 161 | 3-1184 | 426 | Asp-1 to Ser-7. | AR089: 19, AR061: 9 | | |
| | | | | | | | H0253: 4, H0423: 2, | | |
| | | | | | | | H0422: 2, H0265: 1, | | |
| | | | | | | | H0341: 1, H0192: 1, | | |
| | | | | | | | H0580: 1, H0393: 1, | | |
| | | | | | | | H0123: 1, H0620: 1, | | |
| | | | | | | | H0284: 1, H0063: 1, | | |
| | | | | | | | H0487: 1, H0539: 1, | | |
| | | | | | | | S3014: 1 and H0677: 1. | | |
| | | 943159 | 266 | 3-605 | 531 | Asp-1 to Ser-7. | | | |
| 152 | HTLGG79 | 1162668 | 162 | 860-1624 | 427 | Gln-4to Met-10, | AR061: 4, AR089: 1 | | |
| | | | | | | Pro-49 to Leu-57, | L0758: 3, L0747: 2, | | |
| | | | | | | Ala-94 to Cys-100, | H0580: 1, H0013: 1, | | |
| | | | | | | Thr-129 to Glu-136, | H0618: 1, H0052: 1, | | |
| | | | | | | Pro-142 to Gly-155, | H0059: 1, L0371: 1, | | |
| | | | | | | Pro-161 to Gln-177, | H0547: 1 and S0458: 1. | | |
| | | | | | | Thr-208 to Cys-213. | | | |
| | | 792317 | 267 | 13-405 | 532 | Glu-33 to His-41, | | | |
| | | | | | | Thr-57 to Gln-62, | | | |
| | | | | | | Ala-66 to Gly-78. | | | |
| 153 | HTLIA13 | 978283 | 163 | 322-2 | 428 | | H0575: 1, H0618: 1 | | |
| | | | | | | | and H0253: 1. | | |
| | | 785622 | 268 | 7-285 | 533 | | | | |
| 154 | HTXJY67 | 1151522 | 164 | 990-634 | 429 | Trp-10 to Pro-19, | AR089: 19, AR061: 6 | | |
| | | | | | | Gly-44 to Ala-50. | L0375: 2, H0659: 2, | | |
| | | | | | | | H0171: 1, H0556: 1, | | |
| | | | | | | | S0114: 1, H0431: 1, | | |
| | | | | | | | H0592: 1, H0486: 1, | | |
| | | | | | | | H0052: 1, H0087: 1, | | |
| | | | | | | | L0803: 1, L0774: 1, | | |
| | | | | | | | L0776: 1, L0659: 1, | | |
| | | | | | | | L0365: 1, L0664: 1, | | |
| | | | | | | | H0519: 1,H0660: 1, | | |
| | | | | | | | H0648: 1, H0696: 1, | | |
| | | | | | | | L0439: 1,L0751: 1, | | |
| | | | | | | | L0596: 1, L0592: 1, | | |
| | | | | | | | S0276: 1 and H0543: 1. | | |
| | | 751513 | 269 | 123-359 | 534 | | | | |
| 155 | HUSIJ47 | 1124748 | 165 | 2-559 | 430 | Arg-1 to Pro-7, | AR089: 0, AR061: 0 | | |
| | | | | | | Ser-85 to Ala-94, | T0039: 1, H0013: 1, | | |
| | | | | | | Pro-101 to Lys-120, | H0616: 1, H0412: 1, | | |
| | | | | | | Glu-143 to Asn-148, | L0766: 1, H0519: 1 and | | |
| | | | | | | Ile-166 to Ala-172. | L0758: 1. | | |
| | | 933647 | 270 | 2-481 | 535 | Arg-1 to Pro-7, | | | |
| | | | | | | Ser-85 to Ala-94, | | | |
| | | | | | | Pro-101 to Lys-120. | | | |
| 156 | HWAFS34 | 1106346 | 166 | 561-205 | 431 | | AR089: 23, AR061: 6 | | |
| | | | | | | | H0581: 1 and H0046: | | |
| | | | | | | | 1. | | |
| | | 953968 | 271 | 21-278 | 536 | Gly-20 to Trp-48, | | | |
| | | | | | | Glu-57 to Tyr-66. | | | |
| 157 | HAJAB73 | 1220029 | 167 | 92-721 | 432 | His-12 to Gly-17, | AR089: 1, AR061: 1 | | |
| | | | | | | Tyr-38 to Ile-46, | L0776: 5, L0748: 5, | | |
| | | | | | | Gly-74 to Ser-82, | L0794: 4, H0156: 2, | | |
| | | | | | | Ser-112 to Arg-117, | H0616: 2, L0805: 2, | | |
| | | | | | | Arg-125 to Gly-130, | L0777: 2, T0082: 1, | | |
| | | | | | | Tyr-137 to Ser-144, | H0124: 1, H0591: 1, | | |
| | | | | | | Thr-169 to Met-174. | H0561: 1, L0639: 1, | | |
| | | | | | | | L0637: 1, L0764: 1, | | |
| | | | | | | | L0655: 1, L0659: 1, | | |
| | | | | | | | L0517: 1, L0809: 1, | | |
| | | | | | | | L0790: 1, H0658: 1, | | |
| | | | | | | | L0747: 1, L0749: 1, | | |
| | | | | | | | L0758: 1 and L0759: 1. | | |
| | | 947967 | 272 | 91-672 | 537 | His-12 to Gly-17, | | | |
| | | | | | | Tyr-38 to Ile-46, | | | |
| | | | | | | Gly-74 to Ser-82, | | | |
| | | | | | | Ser-112 to Arg-117, | | | |
| | | | | | | Arg-125 to Gly-130, | | | |
| | | | | | | Tyr-137 to Ser-144. | | | |
| 158 | HDTBD67 | 1164345 | 168 | 252-1175 | 433 | Pro-20 toPro-29, | AR054: 32, AR051: | | |
| | | | | | | Phe-42 to Val-52, | 10, AR089: 3, AR061: | | |
| | | | | | | Leu-106 to Pro-113, | 2, AR050: 2 | | |
| | | | | | | Arg-134 to Gly-139, | H0486: 1 | | |
| | | | | | | Ala-207 to Asn-213, | | | |
| | | | | | | Thr-227 to Phe-239. | | | |
| | | 899636 | 273 | 252-1175 | 538 | Pro-20 to Pro-29, | | | |
| | | | | | | Phe-42 to Val-52, | | | |
| | | | | | | Leu-106 to Pro-113, | | | |
| | | | | | | Arg-134 to Gly-139, | | | |
| | | | | | | Ala-207 to Asn-213, | | | |
| | | | | | | Thr-227 to Phe-239. | | | |
| | | 902517 | 274 | 2-838 | 539 | Phe-13 to Val-23, | | | |
| | | | | | | Leu-77 to Pro-84, | | | |
| | | | | | | Arg-105 to Gly-110, | | | |
| | | | | | | Ala-178 to Asn-184, | | | |
| | | | | | | Thr-198 to Phe-210. | | | |
| 159 | HOHCS04 | 1198730 | 169 | 1-924 | 434 | Gly-44 to Asp-55, | AR089: 1, AR061: 0 | | |
| | | | | | | Phe-77 to Ser-82, | S0250: 3 and H0052: 1. | | |
| | | | | | | Met-143 to Trp-156, | | | |
| | | | | | | Ile-173 to Gly-184, | | | |
| | | | | | | Glu-245 to Ser-252, | | | |
| | | | | | | Asp-302 to Pro-308. | | | |
| | | 947254 | 275 | 1-531 | 540 | | | | |
| 160 | HEBF110 | 956734 | 170 | 1-309 | 435 | Glu-20 to Gly-28, | AR061: 1, AR089: 1 | | |
| | | | | | | Asp-61 to Leu-66, | S0007: 5, S0222: 5, | | |
| | | | | | | Gly-94 to Gly-103. | L0439: 4, H0052: 2, | | |
| | | | | | | | L0612: 2, L0753: 2, | | |
| | | | | | | | S0001: 1, H0333: 1, | | |
| | | | | | | | H0041: 1, N0006: 1, | | |
| | | | | | | | H0068: 1, S0036: 1, | | |
| | | | | | | | S0038: 1, S0112: 1, | | |
| | | | | | | | S0472: 1, L0772: 1, | | |
| | | | | | | | L0800: 1, L0773: 1, | | |
| | | | | | | | L0385: 1, L0790: 1 and | | |
| | | | | | | | L0792: 1. | | |
| 161 | HSHCM81 | 911410 | 171 | 18-686 | 436 | Pro-40 to Ser-45. | AR061: 4, AR089: 3 | | |
| | | | | | | | S0360: 3, H0550: 3, | | |
| | | | | | | | H0619: 2, L0717: 2, | | |
| | | | | | | | H0251: 2, H0292: 2, | | |
| | | | | | | | H0551: 2, L0769: 2, | | |
| | | | | | | | H0658: 2, S3014: 2, | | |
| | | | | | | | S0027: 2, L0777: 2, | | |
| | | | | | | | S0040: 1, L0785: 1, | | |
| | | | | | | | S0282: 1, S0354: 1, | | |
| | | | | | | | H0333: 1, H0505: 1, | | |
| | | | | | | | H0620: 1, H0286: 1, | | |
| | | | | | | | S0250: 1, H0252: 1, | | |
| | | | | | | | H0622: 1, H0163: 1, | | |
| | | | | | | | H0633: 1, H0529: 1, | | |
| | | | | | | | L0369: 1, L0768: 1, | | |
| | | | | | | | L0774: 1, L0659: 1, | | |
| | | | | | | | L0783: 1, L0789: 1, | | |
| | | | | | | | L0664: 1, L0665: 1, | | |
| | | | | | | | S0126: 1, H0521: 1, | | |
| | | | | | | | S0044: 1, H0555: 1, | | |
| | | | | | | | S3012: 1, S0037: 1, | | |
| | | | | | | | S0206: 1, S0032: 1, | | |
| | | | | | | | L0750: 1, L0779: 1, | | |
| | | | | | | | L0731: 1, S0260: 1 and | | |
| | | | | | | | S0026: 1. | | |

[0053] The first column in Table 1A provides the gene number in the application corresponding to the clone identifier. The second column in Table 1A provides a unique “Clone ID NO:Z” for a cDNA clone related to each contig sequence disclosed in Table 1A. This clone ID references the cDNA clone which contains at least the 5′ most sequence of the assembled contig and at least a portion of SEQ ID NO:X was determined by directly sequencing the referenced clone. The reference clone may have more sequence than described in the sequence listing or the clone may have less. In the vast majority of cases, however, the clone is believed to encode a full-length polypeptide. In the case where a clone is not full-length, a full-length cDNA can be obtained by methods described elsewhere herein.

[0054] The third column in Table 1A provides a unique “Contig ID” identification for each contig sequence. The fourth column provides the “SEQ ID NO:” identifier for each of the contig polynucleotide sequences disclosed in Table 1A. The fifth column, “ORF (From-To)”, provides the location (i.e., nucleotide position numbers) within the polynucleotide sequence “SEQ ID NO:X” that delineate the preferred open reading frame (ORF) shown in the sequence listing and referenced in Table 1A, column 6, as SEQ ID NO:Y. Where the nucleotide position number “To” is lower than the nucleotide position number “From”, the preferred ORF is the reverse complement of the referenced polynucleotide sequence.

[0055] The sixth column in Table 1A provides the corresponding SEQ ID NO:Y for the polypeptide sequence encoded by the preferred ORF delineated in column 5. In one embodiment, the invention provides an amino acid sequence comprising, or alternatively consisting of, a polypeptide encoded by the portion of SEQ ID NO:X delineated by “ORF (From-To)”. Also provided are polynucleotides encoding such amino acid sequences and the complementary strand thereto.

[0056] Column 7 in Table 1A lists residues comprising epitopes contained in the polypeptides encoded by the preferred ORF (SEQ ID NO:Y), as predicted using the algorithm of Jameson and Wolf, (1988) Comp. Appl. Biosci. 4:181-186. The Jameson-Wolf antigenic analysis was performed using the computer program PROTEAN (Version 3.11 for the Power MacIntosh, DNASTAR, Inc., 1228 South Park Street Madison, Wis.). In specific embodiments, polypeptides of the invention comprise, or alternatively consist of, at least one, two, three, four, five or more of the predicted epitopes as described in Table 1A. It will be appreciated that depending on the analytical criteria used to predict antigenic determinants, the exact address of the determinant may vary slightly.

[0057] Column 8 in Table 1A provides an expression profile and library code: count for each of the contig sequences (SEQ ID NO:X) disclosed in Table 1A, which can routinely be combined with the information provided in Table 4 and used to determine the tissues, cells, and/or cell line libraries which predominantly express the polynucleotides of the invention. The first number in column 8 (preceding the colon), represents the tissue/cell source identifier code corresponding to the code and description provided in Table 4. For those identifier codes in which the first two letters are not “AR”, the second number in column 8 (following the colon) represents the number of times a sequence corresponding to the reference polynucleotide sequence was identified in the tissue/cell source. Those tissue/cell source identifier codes in which the first two letters are “AR” designate information generated using DNA array technology. Utilizing this technology, cDNAs were amplified by PCR and then transferred, in duplicate, onto the array. Gene expression was assayed through hybridization of first strand cDNA probes to the DNA array. cDNA probes were generated from total RNA extracted from a variety of different tissues and cell lines. Probe synthesis was performed in the presence of ³³P dCTP, using oligo(dT) to prime reverse transcription. After hybridization, high stringency washing conditions were employed to remove non-specific hybrids from the array. The remaining signal, emanating from each gene target, was measured using a Phosphorimager. Gene expression was reported as Phosphor Stimulating Luminescence (PSL) which reflects the level of phosphor signal generated from the probe hybridized to each of the gene targets represented on the array. A local background signal subtraction was performed before the total signal generated from each array was used to normalize gene expression between the different hybridizations. The value presented after “[array code]:” represents the mean of the duplicate values, following background subtraction and probe normalization. One of skill in the art could routinely use this information to identify normal and/or diseased tissue(s) which show a predominant expression pattern of the corresponding polynucleotide of the invention or to identify polynucleotides which show predominant and/or specific tissue and/or cell expression.

[0058] Column 9 in Table 1A provides a chromosomal map location for certain polynucleotides of the invention. Chromosomal location was determined by finding exact matches to EST and cDNA sequences contained in the NCBI (National Center for Biotechnology Information) UniGene database. Each sequence in the UniGene database is assigned to a “cluster”; all of the ESTs, cDNAs, and STSs in a cluster are believed to be derived from a single gene. Chromosomal mapping data is often available for one or more sequence(s) in a UniGene cluster; this data (if consistent) is then applied to the cluster as a whole. Thus, it is possible to infer the chromosomal location of a new polynucleotide sequence by determining its identity with a mapped UniGene cluster.

[0059] A modified version of the computer program BLASTN (Altshul et al., J. Mol. Biol. 215:403-410 (1990); and Gish and States, Nat. Genet. 3:266-272 (1993)) was used to search the UniGene database for EST or cDNA sequences that contain exact or near-exact matches to a polynucleotide sequence of the invention (the ‘Query’). A sequence from the UniGene database (the ‘Subject’) was said to be an exact match if it contained a segment of 50 nucleotides in length such that 48 of those nucleotides were in the same order as found in the Query sequence. If all of the matches that met this criteria were in the same UniGene cluster, and mapping data was available for this cluster, it is indicated in Table 1A under the heading “Cytologic Band”. Where a cluster had been further localized to a distinct cytologic band, that band is disclosed; where no banding information was available, but the gene had been localized to a single chromosome, the chromosome is disclosed.

[0060] Once a presumptive chromosomal location was determined for a polynucleotide of the invention, an associated disease locus was identified by comparison with a database of diseases which have been experimentally associated with genetic loci. The database used was the Morbid Map, derived from OMIM™ (supra). If the putative chromosomal location of a polynucleotide of the invention (Query sequence) was associated with a disease in the Morbid Map database, an OMIM reference identification number was noted in column 10, Table 1A, labelled “OMIM Disease Reference(s)”. Table 5 is a key to the OMIM reference identification numbers (column 1), and provides a description of the associated disease in Column 2.

TABLE 1B

| Clone ID | SEQ ID | CONTIG | BAC ID: | SEQ ID | EXON |
|---|---|---|---|---|---|
| NO: Z | NO: X | ID: | A | NO: B | From-To |
| HKAIP13 | 11 | 1027773 | AL132826 | 543 | 1-633 |
| | | | | | 1655-4097 |
| HKAIP13 | 11 | 1027773 | AL132826 | 544 | 1-846 |
| HE2JT53 | 12 | 1027762 | AC048382 | 545 | 1-952 |
| | | | | | 1136-1461 |
| | | | | | 1480-1789 |
| | | | | | 2179-4133 |
| | | | | | 4135-5351 |
| HE2JT53 | 12 | 1027762 | AC016771 | 546 | 1-3173 |
| | | | | | 6412-6461 |
| HE2JT53 | 12 | 1027762 | AC016771 | 547 | 1-618 |
| HACAD35 | 36 | 949199 | AC007363 | 548 | 1-98 |
| | | | | | 3271-3413 |
| | | | | | 4132-4357 |
| | | | | | 7030-7682 |
| | | | | | 11881-12001 |
| | | | | | 12874-13485 |
| HILBH66 | 50 | 948844 | AC002993 | 549 | 1-137 |
| | | | | | 442-540 |
| | | | | | 568-1008 |
| | | | | | 1344-1626 |
| | | | | | 1756-1879 |
| | | | | | 2077-2554 |
| | | | | | 3178-3803 |
| | | | | | 5748-6271 |
| | | | | | 6847-7154 |
| | | | | | 8656-9216 |
| | | | | | 9424-9551 |
| | | | | | 9635-9891 |
| | | | | | 10095-10199 |
| | | | | | 12317-12503 |
| HILBH66 | 50 | 948844 | AC002993 | 550 | 1-571 |
| HBGQN46 | 53 | 945370 | AF038458 | 551 | 1-630 |
| | | | | | 1311-1416 |
| | | | | | 2481-4022 |
| | | | | | 4952-5252 |
| | | | | | 6370-6479 |
| | | | | | 7623-8269 |
| HHFGP83 | 57 | 828162 | AC026348 | 552 | 1-62 |
| | | | | | 528-1080 |
| | | | | | 1104-1284 |
| | | | | | 1836-1940 |
| | | | | | 2308-2633 |
| HHFGP83 | 57 | 828162 | AC026329 | 553 | 1-102 |
| | | | | | 461-611 |
| | | | | | 3520-3678 |
| | | | | | 4094-4203 |
| | | | | | 4670-5222 |
| | | | | | 5246-5426 |
| | | | | | 5978-6082 |
| | | | | | 6450-6775 |
| | | | | | 8830-9053 |
| | | | | | 9755-10066 |
| | | | | | 10098-10279 |
| | | | | | 10355-10988 |
| | | | | | 12072-13795 |
| HMKCH92 | 58 | 910936 | AC026206 | 554 | 1-52 |
| | | | | | 416-535 |
| | | | | | 1184-1340 |
| | | | | | 1502-1651 |
| | | | | | 4581-4649 |
| | | | | | 10517-10753 |
| | | | | | 10870-10987 |
| | | | | | 13190-13220 |
| HMKCH92 | 58 | 910936 | AC034192 | 555 | 1-52 |
| | | | | | 416-535 |
| | | | | | 1184-1338 |
| | | | | | 1500-1651 |
| | | | | | 4583-4659 |
| | | | | | 10526-10754 |
| | | | | | 10871-10957 |
| HMKCH92 | 58 | 910936 | AC022381 | 556 | 1-52 |
| | | | | | 416-535 |
| | | | | | 1184-1340 |
| | | | | | 1502-1651 |
| | | | | | 4583-4651 |
| | | | | | 10520-10756 |
| | | | | | 10873-10990 |
| | | | | | 13187-13217 |
| HMKCH92 | 58 | 910936 | AC026206 | 557 | 1-107 |
| HMKCH92 | 58 | 910936 | AC022381 | 558 | 1-107 |
| HMSKF13 | 59 | 708207 | AC023891 | 559 | 1-32 |
| | | | | | 159-474 |
| | | | | | 659-1496 |
| | | | | | 2796-2957 |
| | | | | | 3160-3603 |
| | | | | | 5493-5676 |
| | | | | | 8391-8506 |
| | | | | | 8716-8880 |
| | | | | | 8891-9116 |
| | | | | | 9977-10703 |
| | | | | | 11326-12477 |
| HMSKF13 | 59 | 708207 | AC023891 | 560 | 1-169 |
| HMTAV95 | 60 | 614936 | AL137000 | 561 | 1-47 |
| | | | | | 321-642 |
| | | | | | 2386-2508 |
| | | | | | 3316-3493 |
| | | | | | 4104-4572 |
| | | | | | 6015-6340 |
| | | | | | 6520-6573 |
| HMTAV95 | 60 | 614936 | AL137000 | 562 | 1-539 |
| HMTAV95 | 60 | 614936 | AL137000 | 563 | 1-510 |
| HRODF07 | 61 | 952426 | AC023402 | 564 | 1-336 |
| HRODF07 | 61 | 952426 | AC011597 | 565 | 1-336 |
| HMEKQ12 | 68 | 910713 | AC031992 | 566 | 1-1329 |
| HMEKQ12 | 68 | 910713 | AC031992 | 567 | 1-318 |
| | | | | | 459-1427 |
| | | | | | 1854-1922 |
| HNHBF47 | 70 | 949027 | AL390252 | 568 | 1-509 |
| HNHBF47 | 70 | 949027 | AL157901 | 569 | 1-2332 |
| HNHBF47 | 70 | 949027 | AL356389 | 570 | 1-2077 |
| HNHBF47 | 70 | 949027 | AL390252 | 571 | 1-652 |
| HNHBF47 | 70 | 949027 | AL157901 | 572 | 1-522 |
| HNHBF47 | 70 | 949027 | AL356389 | 573 | 1-522 |
| HCQCI06 | 77 | 915000 | AC068763 | 574 | 1-590 |
| | | | | | 819-1083 |
| HCQCI06 | 77 | 915000 | AC069223 | 575 | 1-362 |
| HCQCI06 | 77 | 915000 | AC068763 | 576 | 1-593 |
| HE8UT58 | 78 | 973153 | AC032004 | 577 | 1-120 |
| HLHC168 | 80 | 764745 | AC010344 | 578 | 1-121 |
| | | | | | 2985-3815 |
| | | | | | 4282-4423 |
| HLHCT68 | 80 | 764745 | AC008496 | 579 | 1-96 |
| | | | | | 2321-2645 |
| | | | | | 5406-5532 |
| | | | | | 5545-5688 |
| | | | | | 6055-6205 |
| | | | | | 9065-9895 |
| | | | | | 6055-6205 |
| | | | | | 9065-9895 |
| | | | | | 10362-10503 |
| HLHCT68 | 80 | 764745 | AC010344 | 580 | 1-144 |
| HLHCT68 | 80 | 764745 | AC010344 | 581 | 1-2396 |
| HLHCT68 | 80 | 764745 | AC008496 | 582 | 1-1684 |
| HSSJM44 | 90 | 871067 | AC026352 | 583 | 1-2314 |
| HSSJM44 | 90 | 871067 | AC068755 | 584 | 1-2311 |
| HSSJM44 | 90 | 871067 | AC069443 | 585 | 1-2314 |
| HSSJM44 | 90 | 871067 | AC026352 | 586 | 1-430 |
| HSSJM44 | 90 | 871067 | AC068755 | 587 | 1-430 |
| HSSJM44 | 90 | 871067 | AC069443 | 588 | 1-430 |
| HCEPU56 | 96 | 920347 | AC004381 | 589 | 1-290 |
| | | | | | 2728-2902 |
| | | | | | 3116-4204 |
| | | | | | 4428-8136 |
| HCEPU56 | 96 | 920347 | AC004381 | 590 | 1-33 |
| | | | | | 1349-1644 |
| HEGAP32 | 101 | 851207 | AC069103 | 591 | 1-150 |
| | | | | | 291-458 |
| | | | | | 622-724 |
| | | | | | 820-956 |
| | | | | | 1055-1387 |
| HEGAP32 | 101 | 851207 | AC051649 | 592 | 1-150 |
| | | | | | 291-458 |
| | | | | | 622-724 |
| | | | | | 820-956 |
| | | | | | 1055-1387 |
| HEGAP32 | 101 | 851207 | AC051649 | 593 | 1-54 |
| | | | | | 549-712 |
| HEGAP32 | 101 | 851207 | AC051649 | 594 | 1-209 |
| | | | | | 848-884 |
| | | | | | 1434-1619 |
| | | | | | 1700-1832 |
| | | | | | 1992-2086 |
| | | | | | 2191-2388 |
| | | | | | 2628-2855 |
| HETJX04 | 102 | 927120 | AL390040 | 595 | 1-54 |
| | | | | | 340-441 |
| | | | | | 969-1131 |
| | | | | | 3544-3961 |
| | | | | | 5786-5896 |
| | | | | | 7026-7372 |
| | | | | | 7541-8076 |
| | | | | | 8303-8737 |
| | | | | | 10369-10513 |
| | | | | | 10949-11077 |
| | | | | | 11323-13046 |
| HETJX04 | 102 | 927120 | AL390040 | 596 | 1-616 |
| | | | | | 881-994 |
| HFIVB68 | 105 | 752981 | AL137223 | 597 | 1-34 |
| | | | | | 2402-2596 |
| | | | | | 3061-3491 |
| | | | | | 4267-4429 |
| | | | | | 5498-5908 |
| | | | | | 7581-7713 |
| | | | | | 7866-8244 |
| | | | | | 9616-9937 |
| | | | | | 10802-10966 |
| | | | | | 10998-11314 |
| | | | | | 13285-13399 |
| | | | | | 15802-15909 |
| | | | | | 17378-17526 |
| | | | | | 18733-18837 |
| | | | | | 20508-20684 |
| | | | | | 21622-21731 |
| | | | | | 23498-23574 |
| | | | | | 25539-25721 |
| | | | | | 25539-25721 |
| | | | | | 25816-25950 |
| HFIVB68 | 105 | 752981 | AL365364 | 598 | 1-103 |
| | | | | | 2507-2611 |
| | | | | | 4085-4233 |
| | | | | | 5440-5544 |
| | | | | | 7217-7393 |
| | | | | | 8331-8440 |
| | | | | | 10180-10256 |
| | | | | | 12221-12403 |
| | | | | | 12497-12655 |
| | | | | | 12770-12870 |
| | | | | | 14096-14258 |
| | | | | | 16044-16450 |
| | | | | | 16471-16816 |
| | | | | | 17339-18016 |
| | | | | | 20134-20210 |
| HFIVB68 | 105 | 752981 | AL365364 | 599 | 1-317 |
| HFPHI62 | 107 | 934529 | AC004551 | 600 | 1-49 |
| | | | | | 4444-4573 |
| | | | | | 6674-6728 |
| | | | | | 7496-7653 |
| | | | | | 11228-11307 |
| | | | | | 11899-11998 |
| | | | | | 12425-12524 |
| | | | | | 13299-15531 |
| HFTDY67 | 108 | 745221 | AL360229 | 601 | 1-142 |
| | | | | | 800-928 |
| | | | | | 2000-2238 |
| | | | | | 5528-5594 |
| | | | | | 5677-5726 |
| | | | | | 6856-6890 |
| | | | | | 7400-7516 |
| | | | | | 8194-8691 |
| | | | | | 10007-10356 |
| | | | | | 12218-12352 |
| | | | | | 12442-12778 |
| | | | | | 13509-14001 |
| HFTDY67 | 108 | 745221 | AL137223 | 602 | 1-142 |
| | | | | | 800-928 |
| | | | | | 1957-2238 |
| | | | | | 5528-5594 |
| | | | | | 5677-5726 |
| | | | | | 6856-6890 |
| | | | | | 7400-7516 |
| | | | | | 8194-8691 |
| | | | | | 10003-10352 |
| | | | | | 12213-12347 |
| | | | | | 12437-12773 |
| | | | | | 13504-13996 |
| HFTDY67 | 108 | 745221 | AL360229 | 603 | 1-552 |
| HFTDY67 | 108 | 745221 | AL137223 | 604 | 1-303 |
| HFTDY67 | 108 | 745221 | AL137223 | 605 | 1-552 |
| HLHBC30 | 112 | 910079 | AC012510 | 606 | 1-85 |
| | | | | | 1031-2857 |
| | | | | | 2988-3247 |
| | | | | | 3529-3707 |
| | | | | | 4019-4963 |
| HLHBC30 | 112 | 910079 | AC012510 | 607 | 1-1542 |
| | | | | | 1719-1816 |
| | | | | | 2516-2723 |
| | | | | | 3394-4742 |
| | | | | | 4760-5216 |
| HLHBC30 | 112 | 910079 | AC012510 | 608 | 1-105 |
| HPFCU80 | 118 | 685294 | AC005344 | 609 | 1-1314 |
| HPFCU80 | 118 | 685294 | AC005344 | 610 | 1-114 |
| HSYBX32 | 122 | 909846 | AC004084 | 611 | 1-105 |
| | | | | | 839-1021 |
| | | | | | 2069-2302 |
| | | | | | 2470-2855 |
| | | | | | 3818-4265 |
| | | | | | 4371-4610 |
| | | | | | 4761-4810 |
| | | | | | 5364-5802 |
| | | | | | 5930-6517 |
| | | | | | 7073-7807 |
| | | | | | 8063-8618 |
| | | | | | 8636-8875 |
| | | | | | 9438-9537 |
| | | | | | 10568-10774 |
| | | | | | 10897-11025 |
| | | | | | 11718-12323 |
| | | | | | 13749-13849 |
| | | | | | 13978-14188 |
| | | | | | 14474-14554 |
| | | | | | 16489-16624 |
| | | | | | 16924-17019 |
| | | | | | 17239-17458 |
| | | | | | 17908-18185 |
| | | | | | 19014-19266 |
| | | | | | 19356-19451 |
| | | | | | 19620-19873 |
| | | | | | 19863-20920 |
| | | | | | 21092-21247 |
| | | | | | 21512-21579 |
| | | | | | 21621-21754 |
| | | | | | 22001-22831 |
| | | | | | 22992-23518 |
| | | | | | 23710-24370 |
| | | | | | 24426-24596 |
| | | | | | 25213-25493 |
| | | | | | 25661-26192 |
| | | | | | 26588-27433 |
| | | | | | 27598-27742 |
| | | | | | 28073-28199 |
| | | | | | 28359-28651 |
| | | | | | 28777-29249 |
| | | | | | 29379-29502 |
| | | | | | 29646-29794 |
| | | | | | 29833-30033 |
| | | | | | 30085-30630 |
| | | | | | 30702-32661 |
| | | | | | 33104-33374 |
| | | | | | 33383-33661 |
| | | | | | 33808-33871 |
| | | | | | 33978-37449 |
| | | | | | 37587-37754 |
| | | | | | 38296-38433 |
| | | | | | 38597-39343 |
| | | | | | 40047-40395 |
| | | | | | 40462-40743 |
| | | | | | 40938-41039 |
| | | | | | 41187-41634 |
| | | | | | 42504-42687 |
| | | | | | 42703-42850 |
| | | | | | 42929-43475 |
| HSYBX32 | 122 | 909846 | AC004951 | 612 | 1-735 |
| | | | | | 991-1547 |
| HSYBX32 | 122 | 909846 | AC004084 | 613 | 1-239 |
| HSYBX32 | 122 | 909846 | AC004084 | 614 | 1-283 |
| HSYBX32 | 122 | 909846 | AC004951 | 615 | 1-255 |
| HSYBX32 | 122 | 909846 | AC004951 | 616 | 1-318 |
| HTAHB43 | 123 | 909845 | AC004084 | 617 | 1-105 |
| | | | | | 839-1021 |
| | | | | | 2069-2302 |
| | | | | | 2470-2855 |
| | | | | | 3818-4265 |
| | | | | | 4371-4610 |
| | | | | | 4761-4810 |
| | | | | | 5364-5802 |
| | | | | | 5930-6517 |
| | | | | | 7073-7807 |
| | | | | | 8063-8618 |
| | | | | | 8636-8875 |
| | | | | | 9438-9537 |
| | | | | | 10568-10774 |
| | | | | | 10897-11025 |
| | | | | | 11718-12323 |
| | | | | | 13749-13849 |
| | | | | | 13978-14188 |
| | | | | | 14474-14554 |
| | | | | | 16489-16624 |
| | | | | | 16924-17019 |
| | | | | | 17239-17458 |
| | | | | | 17908-18185 |
| | | | | | 19014-19266 |
| | | | | | 19356-19451 |
| | | | | | 19620-19873 |
| | | | | | 19893-20920 |
| | | | | | 21092-21247 |
| | | | | | 21512-21579 |
| | | | | | 21621-21754 |
| | | | | | 22001-22831 |
| | | | | | 22992-23518 |
| | | | | | 23710-24370 |
| | | | | | 24426-24596 |
| | | | | | 25213-25493 |
| | | | | | 25661-26192 |
| | | | | | 26588-27433 |
| | | | | | 27598-27742 |
| | | | | | 28073-28199 |
| | | | | | 28359-28651 |
| | | | | | 28777-29249 |
| | | | | | 29379-29502 |
| | | | | | 29646-29794 |
| | | | | | 29833-30033 |
| | | | | | 30085-30630 |
| | | | | | 30702-32661 |
| | | | | | 33104-33374 |
| | | | | | 33383-33661 |
| | | | | | 33808-33874 |
| | | | | | 33978-37449 |
| | | | | | 37587-37754 |
| | | | | | 38296-38433 |
| | | | | | 38597-39343 |
| | | | | | 40047-40395 |
| | | | | | 40462-40743 |
| | | | | | 40938-41039 |
| | | | | | 54187-41634 |
| | | | | | 42504-42687 |
| | | | | | 42703-42850 |
| | | | | | 42929-43475 |
| HTAHB43 | 123 | 909845 | AC004084 | 618 | 1-239 |
| HTAHB43 | 123 | 909845 | AC004084 | 619 | 1-283 |
| HTEDF74 | 125 | 522982 | AC025517 | 620 | 1-699 |
| | | | | | 950-1227 |
| | | | | | 1886-2956 |
| HTEDF74 | 125 | 522982 | AC025517 | 621 | 1-688 |
| HTEDF74 | 125 | 522982 | AC025517 | 622 | 1-419 |
| | | | | | 740-824 |
| | | | | | 1353-2261 |
| | | | | | 2992-3150 |
| HWHQC94 | 130 | 715096 | AL353795 | 623 | 1-102 |
| | | | | | 422-585 |
| | | | | | 793-977 |
| | | | | | 1234-1479 |
| | | | | | 1531-3080 |
| | | | | | 3334-3540 |
| | | | | | 3575-4079 |
| HWHQC94 | 130 | 715096 | AC004472 | 624 | 1-98 |
| | | | | | 411-926 |
| | | | | | 1616-1764 |
| | | | | | 1956-2088 |
| | | | | | 2400-2560 |
| | | | | | 2768-2952 |
| | | | | | 3209-3454 |
| | | | | | 3506-5055 |
| | | | | | 5309-5515 |
| | | | | | 5550-6054 |
| | | | | | 6528-7369 |
| HWHQC94 | 130 | 715096 | AC004472 | 625 | 1-944 |
| | | | | | 2113-2941 |
| | | | | | 3227-3682 |
| | | | | | 3774-3890 |
| | | | | | 4036-4166 |
| HWHQC94 | 130 | 715096 | AC004472 | 626 | 1-385 |
| | | | | | 388-583 |
| | | | | | 825-947 |
| | | | | | 1726-1768 |
| HYABL89 | 132 | 786157 | AC009242 | 627 | 1-82 |
| | | | | | 232-393 |
| | | | | | 2371-2840 |
| | | | | | 2862-3912 |
| | | | | | 4535-4841 |
| | | | | | 5002-5306 |
| | | | | | 5566-5957 |
| HYABL89 | 132 | 786157 | AC009242 | 628 | 1-346 |
| HYABL89 | 132 | 786157 | AC009242 | 629 | 1-363 |
| HCUEU74 | 138 | 576538 | AP001320 | 630 | 1-896 |
| | | | | | 1122-1948 |
| | | | | | 2006-2632 |
| HCUEU74 | 138 | 576538 | AP000663 | 631 | 1-894 |
| | | | | | 1120-1946 |
| | | | | | 2004-2634 |
| HCUEU74 | 138 | 576538 | AP000663 | 632 | 1-301 |
| HCUEU74 | 138 | 576538 | AP001320 | 633 | 1-312 |
| HDPCM62 | 139 | 454740 | AC067849 | 634 | 1-1270 |
| HDPCM62 | 139 | 454740 | AC067849 | 635 | 1-408 |
| HFIUM16 | 146 | 661845 | AC067849 | 636 | 1-1270 |
| HFIUM16 | 146 | 661845 | AC067849 | 637 | 1-408 |
| HHFGV79 | 150 | 573532 | AC022468 | 638 | 1-177 |
| | | | | | 1919-2191 |
| | | | | | 2378-2445 |
| | | | | | 2824-3115 |
| | | | | | 3785-3893 |
| | | | | | 4548-4768 |
| | | | | | 5277-5389 |
| | | | | | 7628-7715 |
| | | | | | 9133-9219 |
| | | | | | 10836-11155 |
| | | | | | 13250-13311 |
| | | | | | 14075-14232 |
| | | | | | 14420-15643 |
| HHFGV79 | 150 | 573532 | AC022468 | 639 | 1-738 |
| | | | | | 1117-2425 |
| HMMAL17 | 155 | 662379 | AC067849 | 640 | 1-1270 |
| HMMAL17 | 155 | 662379 | AC067849 | 641 | 1-408 |
| HSDAG13 | 157 | 968438 | AC068495 | 642 | 1-522 |
| HSDAG13 | 157 | 968438 | AC022123 | 643 | 1-543 |
| HSDAG13 | 157 | 968438 | AC012638 | 644 | 1-827 |
| HSDAG13 | 157 | 968438 | AC012638 | 645 | 1-470 |
| HSHCM81 | 171 | 911410 | AL359384 | 646 | 1-160 |
| | | | | | 507-741 |
| | | | | | 963-1130 |
| | | | | | 1356-1388 |
| | | | | | 3313-3511 |
| | | | | | 3835-4220 |
| | | | | | 4863-4952 |
| | | | | | 5803-5972 |
| | | | | | 6096-6332 |
| | | | | | 8210-8355 |
| | | | | | 8973-9302 |

[0061] Table 1B summarizes additional polynucleotides encompassed by the invention (including cDNA clones related to the sequences (Clone ID NO:Z), contig sequences (contig identifier (Contig ID:) contig nucleotide sequence identifiers (SEQ ID NO:X)), and genomic sequences (SEQ ID NO:B). The first column provides a unique clone identifier, “Clone ID NO:Z”, for a cDNA clone related to each contig sequence. The second column provides the sequence identifier, “SEQ ID NO:X”, for each contig sequence. The third column provides a unique contig identifier, “Contig ID:” for each contig sequence. The fourth column, provides a BAC identifier “BAC ID NO:A” for the BAC clone referenced in the corresponding row of the table. The fifth column provides the nucleotide sequence identifier, “SEQ ID NO:B” for a fragment of the BAC clone identified in column four of the corresponding row of the table. The sixth column, “Exon From-To”, provides the location (i.e., nucleotide position numbers) within the . polynucleotide sequence of SEQ ID NO:B which delineate certain polynucleotides of the invention that are also exemplary members of polynucleotide sequences that encode polypeptides of the invention (e.g., polypeptides containing amino acid sequences encoded by the polynucleotide sequences delineated in column six, and fragments and variants thereof).

TABLE 2

| | | | | | | Score/ | | |
|---|---|---|---|---|---|---|---|---|
| Clone ID | Contig | SEQ ID | Analysis | | PFam/NR | Percent | | |
| NO: Z | ID: | NO: X | Method | PFam/NR Description | Accession Number | Identity | From | To |
| HKAIP13 | 1027773 | 11 | blastx.14 | (AF007139) unknown | gi\|2852615\|gb\|AAC1 | 63% | 1155 | 1436 |
| | | | | [Homo sapiens] | 9151.1\| | 65% | 1575 | 1730 |
| | | | | | | 65% | 1743 | 1802 |
| | | | | | | 66% | 1449 | 1493 |
| | | | | | | 45% | 1464 | 1535 |
| HARMY82 | 930293 | 13 | HMMER | PFAM: Lectin C-type | PF00059 | 21.17 | 254 | 367 |
| | | | 1.8 | domain short and long | | | | |
| | | | | forms | | | | |
| | | | blastx.2 | (AF047445) Ly-49L | gb\|AAC35898.1\| | 100% | 88 | 255 |
| | | | | [Homo sapiens] | | | | |
| HDPBG11 | 945456 | 173 | HMMER | PFAM: Lectin C-type | PF00059 | 29.34 | 630 | 734 |
| | | | 1.8 | domain short and long | | | | |
| | | | | forms | | | | |
| | | | blastx.2 | (AJ242859) langerin | emb\|CAB62403.1\| | 99% | 39 | 734 |
| | | | | [Homo sapiens] | | | | |
| HKAJ155 | 1132402 | 15 | blastx.14 | (AF134838) endocytic | gi\|4835878\|gb\|AAD3 | 100% | 19 | 738 |
| | | | | receptor Endo 180 [Homo | 0280.1\|AF134838_1 | 36% | 106 | 321 |
| | | | | sapiens] | | 22% | 223 | 609 |
| | | | | | | 32% | 187 | 315 |
| | | | | | | 44% | 511 | 624 |
| | | | | | | 28% | 58 | 207 |
| | | | | | | 37% | 208 | 327 |
| | | | | | | 34% | 109 | 237 |
| | | | | | | 29% | 97 | 207 |
| | | | | | | 26% | 511 | 636 |
| | | | | | | 29% | 526 | 636 |
| | | | | | | 37% | 343 | 423 |
| | | | | | | 26% | 634 | 735 |
| | | | | | | 44% | 367 | 420 |
| | | | | | | 23% | 643 | 744 |
| | | | | | | 30% | 667 | 744 |
| | | | | | | 30% | 250 | 318 |
| | | | | | | 25% | 577 | 732 |
| | | | | | | 28% | 526 | 609 |
| | | | | | | 20% | 619 | 750 |
| | | | | | | 26% | 46 | 102 |
| | | | | | | 28% | 25 | 99 |
| | | | | | | 50% | 367 | 396 |
| | | | | | | 35% | 488 | 547 |
| HKAJ155 | 938506 | 174 | HMMER | PFAM: Lectin C-type | PF00059 | 168.66 | 36 | 407 |
| | | | 1.8 | domain short and long | | | | |
| | | | | forms | | | | |
| | | | blastx.2 | (AF134838) endocytic | gb\|AAD30280.1\|AF1 | 90% | 9 | 560 |
| | | | | receptor Endo 180 [Homo | 34838_1 | 30% | 9 | 488 |
| | | | | sapiens] | | 29% | 48 | 413 |
| | | | | | | 28% | 36 | 410 |
| | | | | | | 29% | 36 | 413 |
| | | | | | | 25% | 39 | 407 |
| | | | | | | 41% | 383 | 433 |
| HKAJI55 | 949243 | 175 | HMMER | PFAM: Lectin C-type | PF00059 | 76.1 | 564 | 322 |
| | | | 1.8 | domain short and long | | | | |
| | | | | forms | | | | |
| | | | blastx.14 | (AF134838) endocytic | gi\|4835878\|gb\|AAD3 | 96% | 570 | 319 |
| | | | | receptor Endo 180 [Homo | 0280.1\|AF134838_1 | 77% | 593 | 567 |
| | | | | sapiens] | | | | |
| HMTBC77 | 1083572 | 16 | blastx.2 | HIV gp120-binding C- | pir\|A46274\|A46274 | 45% | 131 | 370 |
| | | | | type lectin - human | | | | |
| HMTBC77 | 943279 | 176 | HMMER | PFAM: Lectin C-type | PF00059 | 78.29 | 131 | 355 |
| | | | 1.8 | domain short and long | | | | |
| | | | | forms | | | | |
| | | | blastx.2 | <no link | gb\|AAA48814.1\| | 42% | 131 | 355 |
| HE8UA52 | 948509 | 17 | HMMER | PFAM: von Willebrand | PF00092 | 57.11 | 208 | 561 |
| | | | 1.8 | factor type A domain | | | | |
| | | | blastx.14 | alpha-3 collagen type VI | gi\|211622\|gb\|AAA03 | 40% | 121 | 576 |
| | | | | [Gallus gallus] | 201.1\| | | | |
| HHBFK81 | 974909 | 18 | HMMER | PFAM: von Willebrand | PF00092 | 34.64 | 31 | 159 |
| | | | 1.8 | factor type A domain | | | | |
| HJACH50 | 1078153 | 19 | blastx.2 | integrin alpha 1 subunit - | pir\|A45226\|A45226 | 97% | 2 | 409 |
| | | | | human (fragment) | | 90% | 628 | 657 |
| HJACH50 | 941741 | 179 | HMMER | PFAM: von Willebrand | PF00092 | 114.7 | 140 | 400 |
| | | | 2.1.1 | factor type A domain | | | | |
| | | | blastx.2 | integrin alpha 1 subunit - | pir\|A45226\|A45226 | 97% | 2 | 409 |
| | | | | human (fragment) | | | | |
| HFIJC31 | 828148 | 20 | HMMER | PFAM: Fibronectin type | PF00041 | 22.67 | 138 | 404 |
| | | | 1.8 | III domain | | | | |
| HNTMB90 | 910934 | 21 | HMMER | PFAM: Fibronectin type | PF00041 | 71.5 | 204 | 470 |
| | | | 2.1.1 | III domain | | | | |
| | | | blastx.14 | neogenin [Gallus gallus] | gi\|641966\|gb\|AAC59 | 43% | 90 | 233 |
| | | | | | 662.1\| | 27% | 252 | 512 |
| | | | | | | 39% | 201 | 269 |
| | | | | | | 40% | 69 | 134 |
| | | | | | | 40% | 75 | 134 |
| HSDHB12 | 941973 | 22 | HMMER | PFAM: Fibronectin type | PF00041 | 110.6 | 156 | 416 |
| | | | 2.1.1 | III domain | | | | |
| | | | blastx.14 | 165kD protein [Homo | gi\|407097\|emb\|CAA4 | 48% | 9 | 635 |
| | | | | sapiens] | 8832.1\| | 29% | 36 | 446 |
| | | | | | | 32% | 156 | 428 |
| | | | | | | 30% | 255 | 443 |
| | | | | | | 50% | 339 | 446 |
| | | | | | | 50% | 156 | 251 |
| | | | | | | 48% | 33 | 119 |
| | | | | | | 34% | 3 | 131 |
| | | | | | | 45% | 156 | 227 |
| HSDHB12 | 969094 | 181 | HMMER | PFAM: Fibronectin type | PF00041 | 14.26 | 15 | 65 |
| | | | 1.8 | III domain | | | | |
| | | | blastx.14 | 165kD protein [Homo | gi\|407097\|emb\|CAA4 | 48% | 15 | 278 |
| | | | | sapiens] | 8832.1\| | | | |
| HSDHB12 | 969097 | 182 | HMMER | PFAM: Fibronectin type | PF00041 | 110.6 | 691 | 431 |
| | | | 2.1.1 | III domain | | | | |
| | | | blastx.14 | 165kD protein [Homo | gi\|407097\|emb\|CAA4 | 49% | 754 | 212 |
| | | | | sapiens] | 8832.1\| | 34% | 691 | 401 |
| | | | | 32% | 691 | 419 | | |
| | | | | | | 30% | 592 | 404 |
| | | | | | | 50% | 508 | 401 |
| | | | | | | 50% | 691 | 596 |
| | | | | | | 78% | 206 | 165 |
| | | | | | | 45% | 691 | 620 |
| | | | | | | 47% | 136 | 68 |
| | | | | | | 40% | 92 | 27 |
| | | | | | | 32% | 221 | 147 |
| HARMO91 | 1161173 | 23 | blastx.14 | (AF152520) | gi\|5457088\|gb\|AAD4 | 96% | 2 | 1477 |
| | | | | protocadherin gamma B4 | 3780.1\|AF152520_1 | 45% | 269 | 529 |
| | | | | short form protein [Homo | | 50% | 623 | 742 |
| | | | | sapiens] | | 28% | 812 | 1051 |
| | | | | | | 32% | 374 | 547 |
| | | | | | | 26% | 59 | 292 |
| | | | | | | 22% | 581 | 730 |
| | | | | | | 36% | 572 | 637 |
| HARMO91 | 947986 | 183 | HMMER | PFAM: Cadherin | PF00028 | 87.36 | 219 | 509 |
| | | | 1.8 | | | | | |
| | | | blastx.14 | (AF152520) | gi\|5457088\|gb\|AAD4 | 100% | 96 | 551 |
| | | | | protocadherin gamma B4 | 3780.1\|AF152520_1 | 95% | 548 | 688 |
| | | | | short form protein [Homo | | 50% | 360 | 545 |
| | | | | sapiens] | | 28% | 150 | 437 |
| | | | | | | 42% | 384 | 503 |
| | | | | | | 77% | 691 | 744 |
| | | | | | | 26% | 150 | 383 |
| | | | | | | 33% | 465 | 545 |
| | | | | | | 28% | 147 | 302 |
| | | | | | | 31% | 501 | 587 |
| | | | | | | 36% | 554 | 628 |
| | | | | | | 33% | 444 | 515 |
| HFPFB75 | 947988 | 184 | HMMER | PFAM: Cadherin domain | PF00028 | 131.4 | 219 | 506 |
| | | | 2.1.1 | | | | | |
| | | | blastx.14 | K-cadherin [Rattus | gi\|435461\|dbj\|BAA04 | 82% | 111 | 737 |
| | | | | norvegicus] | 975.11 | | | |
| HFPGX08 | 1152339 | 25 | blastx.14 | (AB026187) | gi\|6978935\|dbj\|BAA9 | 72% | 243 | 353 |
| | | | | protocadherin-Xa [Homo | 0765.1\| | 46% | 120 | 248 |
| | | | | sapiens] | | 40% | 348 | 509 |
| | | | | | | 60% | 9 | 38 |
| HFPGX08 | 957896 | 185 | HMMER | PFAM: Cadherin | PF00028 | 50.51 | 139 | 432 |
| | | | 1.8 | | | | | |
| | | | blastx.14 | protocadherin 42 [Homo | gi\|387675\|gb\|AAA36 | 45% | 106 | 387 |
| | | | | sapiens] | 419.1\| | 50% | 853 | 1044 |
| | | | | | | 37% | 1 | 168 |
| | | | | | | 34% | 1 | 132 |
| | | | | | | 56% | 157 | 231 |
| | | | | | | 43% | 385 | 480 |
| | | | | | | 39% | 1 | 99 |
| | | | | | | 30% | 1 | 99 |
| | | | | | | 36% | 7 | 105 |
| | | | | | | 52% | 160 | 228 |
| | | | | | | 36% | 7 | 114 |
| | | | | | | 33% | 247 | 363 |
| | | | | | | 33% | 163 | 243 |
| | | | | | | 26% | 847 | 960 |
| | | | | | | 28% | 844 | 918 |
| | | | | | | 34% | 253 | 357 |
| HFXJD66 | 937443 | 186 | HMMER | PFAM: Cadherin domain | PF00028 | 88.7 | 424 | 630 |
| | | | 2.1.1 | | | | | |
| | | | blastx.2 | (AB000512) cadherin-10 | dbj\|BAA19130.1\| | 45% | 1 | 669 |
| | | | | [Gallus gallus] | | 30% | 28 | 627 |
| HFXJD66 | 955373 | 187 | HMMER | PFAM: Cadherin | PF01049 | 134.7 | 745 | 542 |
| | | | 2.1.1 | cytoplasmic region | | | | |
| HKABY22 | 945467 | 188 | HMMER | PFAM: Cadherin | PF00028 | 23.53 | 56 | 352 |
| | | | 1.8 | | | | | |
| | | | blastx.2 | (AL137477) hypothetical | emb\|CAB70758.1\| | 100% | 62 | 439 |
| | | | | protein [Homo sapiens] | | | | |
| HLHCQ90 | 1128610 | 28 | blastx.14 | (AC004836) similar to | gi\|4699969\|gb\|AAD2 | 75% | 313 | 480 |
| | | | | cadherin and 1 sapiens] | 8068.1\|AC004836_1 | 70% | 1299 | 1328 |
| HLHCQ90 | 863222 | 189 | HMMER | PFAM: Cadherin | PF00028 | 9.1 | 241 | 411 |
| | | | 1.8 | | | | | |
| HMKAJ50 | 950532 | 191 | HMMER | PFAM: Cadherin | PF00028 | 69.68 | 201 | 497 |
| | | | 1.8 | | | | | |
| | | | blastx.2 | (AB035303) cadherin-10 | dbj\|BAA87417.1\| | 99% | 78 | 554 |
| | | | | [Homo sapiens] | | 51% | 575 | 655 |
| | | | | | | 47% | 22 | 72 |
| HNGME19 | 1152253 | 30 | blastx.14 | (AB026187) | gi\|6978935\|dbj\|BAA9 | 51% | 3 | 698 |
| | | | | protocadherin-Xa [Homo | 0765.1\| | 52% | 705 | 914 |
| | | | | sapiens] | | 38% | 111 | 380 |
| | | | | | | 34% | 108 | 353 |
| | | | | | | 45% | 438 | 563 |
| | | | | | | 34% | 84 | 239 |
| | | | | | | 34% | 417 | 563 |
| | | | | | | 26% | 213 | 404 |
| | | | | | | 33% | 723 | 881 |
| | | | | | | 37% | 390 | 494 |
| | | | | | | 52% | 618 | 686 |
| | | | | | | 52% | 288 | 362 |
| | | | | | | 66% | 519 | 563 |
| | | | | | | 25% | 714 | 830 |
| | | | | | | 29% | 378 | 500 |
| | | | | | | 44% | 3 | 56 |
| | | | | | | 52% | 645 | 695 |
| | | | | | | 28% | 504 | 566 |
| | | | | | | 27% | 612 | 665 |
| | | | | | | 53% | 207 | 251 |
| HNGME19 | 940825 | 192 | HMMER | PFAM: Cadherin domain | PF00028 | 187.4 | 264 | 533 |
| | | | 2.1.1 | | | | | |
| | | | blastx.2 | (AB026187) | dbj\|BAA90765.1\| | 52% | 9 | 863 |
| | | | | protocadherin-Xa [Homo | | 33% | 3 | 851 |
| | | | | sapiens] | | 30% | 12 | 818 |
| | | | | | | 31% | 63 | 857 |
| | | | | | | 31% | 105 | 866 |
| HOGEO44 | 910733 | 193 | HMMER | PFAM: Cadherin domain | PF00028 | 93.9 | 241 | 513 |
| | | | 2.1.1 | | | | | |
| HWDAE94 | 947194 | 32 | HMMER | PFAM: Cadherin domain | PF00028 | 100.4 | 202 | 492 |
| | | | 2.1.1 | | | | | |
| | | | blastx.2 | (AF152522) | gb\|AAD43782.1\|AF1 | 94% | 1 | 531 |
| | | | | protocadherin gamma B6 | 52522_1 | 30% | 10 | 507 |
| | | | | short form protein [Homo | | 32% | 58 | 507 |
| | | | | sapiens] | | 33% | 58 | 495 |
| | | | | | | 29% | 145 | 507 |
| | | | | | | 100% | 509 | 532 |
| HWDAE94 | 947195 | 194 | HMMER | PFAM; Cadherin | PF00028 | 7.49 | 2726 | 2649 |
| | | | 1.8 | | | | | |
| | | | blastx.2 | (AF152335) | gb\|AAD43729.1\| | 99% | 2 | 919 |
| | | | | protocadherin gamma B6 | | | | |
| | | | | [Homo sapiens] | | | | |
| HWHGC57 | 1085498 | 33 | blastx.2 | (AK000054) unnamed | dbj\|BAA90911.1\| | 36% | 32 | 604 |
| | | | | protein product [Homo | | 35% | 122 | 601 |
| | | | | sapiens] | | 42% | 601 | 663 |
| HWHGC57 | 942388 | 195 | HMMER | PFAM: Cadherin | PF00028 | 40.03 | 59 | 253 |
| | | | 1.8 | | | | | |
| | | | blastx.2 | (AK000054) unnamed | dbj\|BAA90911.1\| | 39% | 71 | 499 |
| | | | | protein product [Homo | | 36% | 122 | 409 |
| | | | | sapiens] | | 35% | 493 | 603 |
| | | | | | | 43% | 490 | 600 |
| | | | | | | 39% | 490 | 588 |
| | | | | | | 42% | 600 | 662 |
| HWHPE63 | 940445 | 34 | HMMER | PFAM: Cadherin | PF00028 | 80.3 | 3 | 257 |
| | | | 1.8 | | | | | |
| | | | blastx.2 | (AL137477) hypothetical | emb\|CAB70758.1\| | 97% | 183 | 590 |
| | | | | protein [Homo sapiens] | | 90% | 575 | 706 |
| HWHPE63 | 943866 | 196 | blastx.2 | (AL137477) hypothetical | emb\|CAB70758.1] | 74% | 184 | 507 |
| | | | | protein [Homo sapiens] | | 96% | 184 | 279 |
| | | | | | | 44% | 302 | 484 |
| HTEPC92 | 1129089 | 35 | blastx.14 | (AF124841) C-type lectin- | gi\|7109731\|gb\|AAF36 | 78% | 277 | 426 |
| | | | | like receptor-21 | 777.1\|AF124841_1 | | | |
| HTEPC92 | 947666 | 198 | HMMER | PFAM: Lectin C-type | PF00059 | 60.55 | 761 | 970 |
| | | | 1.8 | domain short and long | | | | |
| | | | | forms | | | | |
| | | | blastx.2 | (AF124841) C-type lectin- | gb\|AAF36777.1\|AF1 | 78% | 270 | 419 |
| | | | | like receptor-2 [Homo 1 | 24841_1 | | | |
| HACAD35 | 949199 | 36 | HMMER | PFAM: von Willebrand | PF00092 | 70.8 | 1461 | 1174 |
| | | | 2.1.1 | factor type A domain | | | | |
| | | | blastx.2 | (AC007363) similar to | gb\|AAF19243.1\|AC0 | 99% | 11 | 523 |
| | | | | Coch-5B2 [Homo sapiens] | 07363_1 | 100% | 528 | 827 |
| | | | | | | 95% | 818 | 1018 |
| | | | | | | 22% | 531 | 812 |
| | | | | | | 50% | 470 | 523 |
| HBXFI23 | 945319 | 37 | HMMER | PFAM: Lectin C-type | PF00059 | 77.54 | 247 | 540 |
| | | | 1.8 | domain short and long | | | | |
| | | | | forms | | | | |
| | | | blastx.2 | asialoglycoprotein | dbj\|BAA02734.1\| | 37% | 247 | 531 |
| | | | | receptor [Mus musculus] | | 52% | 527 | 583 |
| HDPMQ42 | 972069 | 199 | HMMER | PFAM: Lectin C-type | PF00059 | 134.39 | 334 | 711 |
| | | | 1.8 | domain short and long | | | | |
| | | | | forms | | | | |
| | | | blastx.2 | (AF109146) C-type lectin | gb\|AAF14348.1\|AF1 | 99% | 25 | 729 |
| | | | | DDB27 [Homo sapiens] | 09146_1 | | | |
| HDPPU44 | 951276 | 200 | HMMER | PFAM: Lectin C-type | PF00059 | 37.49 | 245 | 376 |
| | | | 1.8 | domain short and long | | | | |
| | | | | forms | | | | |
| HDPTQ81 | 1045003 | 40 | blastx.2 | carbohydrate-binding | gb\|AAA40892.1\| | 66% | 3 | 281 |
| | | | | receptor [Rattus | | 61% | 944 | 1090 |
| | | | | norvegicus] | | | | |
| HDPTQ81 | 951249 | 201 | HMMER | PFAM: Lectin C-type | PF00059 | 100.2 | 33 | 266 |
| | | | 1.8 | domain short and long | | | | |
| | | | | forms | | | | |
| | | | blastx.2 | carbohydrate-binding | gb\|AAA40892.1\| | 67% | 42 | 281 |
| | | | | receptor [Rattus | | 46% | 1 | 39 |
| | | | | norvegicus] | | | | |
| HEQBH92 | 1128230 | 41 | blastx.14 | (AF134838) endocytic | gi\|4835878\|gb\|AAD3 | 70% | 6 | 191 |
| | | | | receptor Endo 180 [Homo | 0280.1\|AF134838_1 | 90% | 181 | 303 |
| | | | | sapiens] | | 48% | 320 | 430 |
| | | | | | | 54% | 306 | 398 |
| | | | | | | 28% | 199 | 312 |
| | | | | | | 66% | 156 | 191 |
| | | | | | | 50% | 144 | 173 |
| | | | | | | 36% | 327 | 392 |
| HEQBH92 | 839319 | 202 | HMMER | PFAM: Lectin C-type | PF00059 | 22.92 | 45 | 236 |
| | | | 1.8 | domain short and long | | | | |
| | | | | forms | | | | |
| HLTEO24 | 1194106 | 42 | blastx.14 | LECTIN-LIKE | sp\|P78380\|P78380 | 45% | 391 | 495 |
| | | | | OXIDIZED LDL | | 36% | 172 | 309 |
| | | | | RECEPTOR. | | | | |
| HLTEO24 | 937797 | 203 | HMMER | PFAM: Lectin C-type | PF00059 | 35.06 | 402 | 536 |
| | | | 1.8 | domain short and long | | | | |
| | | | | forms | | | | |
| HOABR66 | 944115 | 204 | HMMER | PFAM: Lectin C-type | PF00059 | 60.74 | 454 | 681 |
| | | | 1.8 | domain short and long | | | | |
| | | | | forms | | | | |
| | | | blastx.2 | (AF134838) endocytic | gb\|AAD30280.1\|AF1 | 85% | 89 | 517 |
| | | | | receptor Endo 180 [Homo | 34838_1 | 100% | 454 | 690 |
| | | | | sapiens] | | 100% | 3 | 86 |
| | | | | | | 30% | 89 | 397 |
| | | | | | | 30% | 95 | 427 |
| | | | | | | 32% | 418 | 690 |
| | | | | | | 30% | 89 | 487 |
| | | | | | | 30% | 95 | 433 |
| | | | | | | 29% | 95 | 493 |
| | | | | | | 22% | 71 | 433 |
| | | | | | | 36% | 511 | 681 |
| | | | | | | 30% | 526 | 684 |
| | | | | | | 28% | 421 | 633 |
| | | | | | | 22% | 421 | 690 |
| HWADF26 | 1151531 | 44 | blastx.14 | (AF175206) lectin-like | gi\|7188567\|gb\|AAF37 | 92% | 3 | 611 |
| | | | | receptor F1 [Homo 1 | 804.1\|AF175206_1 | | | |
| HWADF26 | 957347 | 205 | HMMER | PFAM: Lectin C-type | PF00059 | 104.26 | 859 | 509 |
| | | | 1.8 | domain short and long | | | | |
| | | | | forms | | | | |
| | | | blastx.2 | (AF175206) lectin-like | gb\|AAF37804.1\|AF1 | 100% | 3 | 596 |
| | | | | receptor F1 [Homo | 75206_1 | | | |
| | | | | sapiens] | | | | |
| HWAGT47 | 939095 | 206 | HMMER | PFAM: Lectin C-type | PF00059 | 78.87 | 255 | 485 |
| | | | 1.8 | domain short and long | | | | |
| | | | | forms | | | | |
| | | | blastx.2 | (AF175206) lectin-like | gb\|AAF37804.1\|AF1 | 93% | 174 | 491 |
| | | | | receptor F1 [Homo | 75206_1 | 100% | 4 | 174 |
| | | | | sapiens] | | | | |
| HHFJH79 | 933308 | 46 | HMMER | PFAM: von Willebrand | PF00092 | 12.76 | 62 | 232 |
| | | | 1.8 | factor type A domain | | | | |
| | | | blastx.14 | (AC006942) R31181_2, | gi\|4314341\|gb\|AAD1 | 99% | 14 | 316 |
| | | | | partial protein [Homo | 5565.11 | | | |
| | | | | sapiens] | | | | |
| HPJEV71 | 949153 | 47 | HMMER | PFAM: von Willebrand | PF00092 | 47.98 | 866 | 1375 |
| | | | 1.8 | factor type A domain | | | | |
| HRDAF83 | 957143 | 207 | HMMER | PFAM: von Willebrand | PF00092 | 89.99 | 72 | 332 |
| | | | 1.8 | factor type A domain | | | | |
| | | | blastx.2 | (AF137378) integrin alpha | gb\|AAD51919.2\|AF1 | 92% | 36 | 332 |
| | | | | 11 subunit precursor | 37378_1 | | | |
| | | | | [Homo sapiens] | | | | |
| HUFCN91 | 949137 | 209 | HMMER | PFAM: von Willebrand | PF00092 | 9.83 | 529 | 729 |
| | | | 1.8 | factor type A domain | | | | |
| | | | blastx.14 | copine I [Homo sapiens] | gi\|1791257\|gb\|AAC1 | 56% | 103 | 588 |
| | | | | | 5920.1\| | 48% | 971 | 1333 |
| | | | | | | 48% | 562 | 783 |
| | | | | | | 57% | 1332 | 1430 |
| | | | | | | 45% | 899 | 1009 |
| | | | | | | 64% | 784 | 834 |
| HILBH66 | 948844 | 50 | HMMER | PFAM: Integrins alpha | PF00357 | 47.26 | 160 | 363 |
| | | | 1.8 | chain | | | | |
| | | | blastx.14 | integrin alpha-E chain - | pir\|A53213\|A53213 | 76% | 130 | 414 |
| | | | | human | | 83% | 79 | 150 |
| HLWAW86 | 941397 | 210 | HMMER | PFAM: Integrins alpha | PF00357 | 163.29 | 115 | 459 |
| | | | 1.8 | chain | | | | |
| HAHEF22 | 910996 | 52 | HMMER | PFAM: Fibronectin type | PF00041 | 146.8 | 396 | 656 |
| | | | 2.1.1 | III domain | | | | |
| HBGQN46 | 945370 | 53 | HMMER | PFAM: Fibronectin type | PF00041 | 11 | 171 | 314 |
| | | | 1.8 | III domain | | | | |
| HCEOR02 | 921110 | 54 | HMMER | PFAM: Fibronectin type | PF00041 | 14.8 | 149 | 373 |
| | | | 1.8 | III domain | | | | |
| HCYBK19 | 925494 | 55 | HMMER | PFAM: Fibronectin type | PF00041 | 26.97 | 368 | 658 |
| | | | 1.8 | III domain | | | | |
| | | | blastx.14 | T10H4.4 [Caenorhabditis | gi\|3879713\|emb\|CAB | 32% | 935 | 1153 |
| | | | | elegans] | 03334.1\| | 37% | 728 | 913 |
| | | | | | | 26% | 1202 | 1336 |
| HEMCL65 | 910900 | 56 | HMMER | PFAM: Fibronectin type | PF00041 | 22.41 | 93 | 278 |
| | | | 1.8 | III domain | | | | |
| | | | blastx.14 | (AF040990) roundabout 1 | gi\|2804784\|gb\|AAC3 | 40% | 141 | 296 |
| | | | | [Homo sapiens] | 9575.1\| | 41% | 9 | 137 |
| | | | | | | 37% | 81 | 161 |
| | | | | | | 47% | 311 | 373 |
| HHFGP83 | 828162 | 57 | HMMER | PFAM: Fibronectin type | PF00041 | 34.53 | 68 | 271 |
| | | | 1.8 | III domain | | | | |
| HMKCH92 | 910936 | 58 | HMMER | PFAM: Fibronectin type | PF00041 | 75.15 | 174 | 443 |
| | | | 1.8 | III domain | | | | |
| | | | blastx.14 | NB-3 [Rattus norvegicus] | gi\|1752645\|dbj\|BAA1 | 86% | 102 | 680 |
| | | | | | 3320.1\| | 97% | 2 | 103 |
| | | | | | | 91% | 700 | 801 |
| | | | | | | 34% | 519 | 605 |
| | | | | | | 24% | 480 | 602 |
| | | | | | | 45% | 438 | 503 |
| | | | | | | 30% | 183 | 242 |
| HMSKF13 | 708207 | 59 | HMMER | PFAM: Fibronectin type | PF00041 | 10.64 | 98 | 193 |
| | | | 1.8 | III domain | | | | |
| HMTAV95 | 614936 | 60 | HMMER | PFAM: Fibronectin type | PF00041 | 11.91 | 6 | 182 |
| | | | 1.8 | III domain | | | | |
| HRODF07 | 952426 | 61 | HMMER | PFAM: Fibronectin type | PF00041 | 16.63 | 82 | 192 |
| | | | 1.8 | III domain | | | | |
| HAGAE60 | 940223 | 62 | HMMER | PFAM: Cadherin domain | PF00028 | 64.7 | 215 | 388 |
| | | | 2.1.1 | | | | | |
| | | | blastx.2 | (AB026187) | dbj\|BAA90765.1\| | 38% | 5 | 550 |
| | | | | protocadherin-Xa [Homo | | 37% | 53 | 493 |
| | | | | sapiens] | | 33% | 8 | 547 |
| | | | | | | 33% | 44 | 526 |
| HCEON04 | 1154308 | 63 | blastx.14 | B0034.3 gene product | gi\|746589\|gb\|AAC38 | 28% | 1255 | 1659 |
| | | | | [Caenorhabditis elegans] | 816.1\| | 36% | 9 | 191 |
| | | | | | | 39% | 471 | 593 |
| | | | | | | 34% | 315 | 461 |
| | | | | | | 34% | 207 | 320 |
| | | | | | | 29% | 753 | 893 |
| | | | | | | 24% | 1921 | 2103 |
| | | | | | | 56% | 1026 | 1073 |
| | | | | | | 42% | 1156 | 1197 |
| | | | | | | 75% | 1881 | 1904 |
| | | | | | | 40% | 840 | 884 |
| HCEON04 | 857817 | 211 | HMMER | PFAM: Cadherin | PF00028 | 17.51 | 96 | 350 |
| | | | 1.8 | | | | | |
| HE2PC86 | 1082523 | 64 | blastx.14 | (AB026187) | gi\|6978935\|dbj\|BAA9 | 72% | 7 | 372 |
| | | | | protocadherin-Xa [Homo | 0765.1\| | 37% | 148 | 381 |
| | | | | sapiens] | | 47% | 163 | 294 |
| | | | | | | 37% | 166 | 372 |
| | | | | | | 43% | 390 | 458 |
| | | | | | | 33% | 31 | 111 |
| | | | | | | 44% | 34 | 87 |
| | | | | | | 53% | 459 | 497 |
| HE2PC86 | 910696 | 212 | HMMER | PFAM: Cadherin | PF00028 | 29.42 | 30 | 224 |
| | | | 1.8 | | | | | |
| | | | blastx.14 | (AF098481) cadherin | gi\|4323233\|gb\|AAD1 | 89% | 87 | 224 |
| | | | | [Gallus gallus] | 6271.1\| | 73% | 6 | 83 |
| | | | | | | 83% | 230 | 265 |
| HE8BN82 | 525050 | 213 | HMMER | PFAM: Ras association | PF00788 | 76.8 | 83 | 301 |
| | | | 2.1.1 | (Ra1GDS/AF-6) domain | | | | |
| HFXAT30 | 1081795 | 66 | blastx.2 | Similar to D. melanogaster | dbj\|BAA13407.1\| | 95% | 2 | 598 |
| | | | | cadherin-related tumor | | 32% | 2 | 598 |
| | | | | suppressor [Homo | | 38% | 29 | 601 |
| | | | | sapiens] | | 34% | 5 | 559 |
| | | | | | | 57% | 592 | 648 |
| HFXAT30 | 951336 | 214 | HMMER | PFAM: Cadherin domain | PF00028 | 75.5 | 146 | 292 |
| | | | 2.1.1 | | | | | |
| | | | blastx.2 | Similar to D. melanogaster | dbj\|BAA13407.1] | 100% | 2 | 301 |
| | | | | cadherin-related tumor | | 41% | 5 | 292 |
| | | | | suppressor [Homo | | 92% | 297 | 413 |
| | | | | sapiens] | | 35% | 2 | 292 |
| | | | | | | 45% | 29 | 238 |
| | | | | | | 38% | 297 | 407 |
| | | | | | | 26% | 164 | 298 |
| | | | | | | 28% | 297 | 413 |
| | | | | | | 87% | 418 | 441 |
| | | | | | | 26% | 297 | 419 |
| HGBAE53 | 914737 | 215 | HMMER | PFAM: Cadherin | PF00028 | 4.48 | 223 | 258 |
| | | | 1.8 | | | | | |
| HMEKQ12 | 910713 | 68 | HMMER | PFAM: Cadherin | PF00028 | 47.18 | 149 | 358 |
| | | | 1.8 | | | | | |
| | | | blastx.14 | OL-protocadherin [Musgi | \|4099551\|gb\|AAD0 | 94% | 86 | 358 |
| | | | | musculus] | 0651.1\| | 96% | 1 | 84 |
| | | | | | | 37% | 86 | 244 |
| | | | | | | 26% | 140 | 229 |
| | | | | | | 53% | 86 | 124 |
| HNDAA52 | 1074878 | 69 | blastx.14 | (AF124396) R-cadherin | gi\|4583423\|gb\|AAD2 | 46% | 54 | 284 |
| | | | | precursor [Danio rerio] | 5078.1\|AF124396_1 | 35% | 324 | 458 |
| | | | | | | 28% | 525 | 608 |
| | | | | | | 56% | 12 | 59 |
| | | | | | | 25% | 459 | 566 |
| HNDAA52 | 910748 | 216 | HMMER | PFAM: Cadherin | PF00028 | 79.18 | 3 | 275 |
| | | | 1.8 | | | | | |
| | | | blastx.14 | (AF124396) R-cadherin | gi\|4583423\|gb\|AAD2 | 46% | 54 | 284 |
| | | | | precursor [Danio rerio] | 5078.1\|AF124396_1 | 35% | 324 | 458 |
| | | | | | | 56% | 12 | 59 |
| | | | | | | 35% | 526 | 585 |
| HNHBF47 | 949027 | 70 | HMMER | PFAM: Cadherin | PF00028 | 44.76 | 668 | 522 |
| | | | 1.8 | | | | | |
| | | | blastx.2 | (AB028499) Flamingo 1 | dbj\|BAA84070.1\| | 96% | 409 | 666 |
| | | | | [Mus musculus] | 92% | 5 | 259 | |
| | | | | | | 91% | 666 | 923 |
| | | | | | | 86% | 243 | 398 |
| | | | | | | 42% | 412 | 660 |
| | | | | | | 36% | 370 | 660 |
| | | | | | | 36% | 412 | 660 |
| | | | | | | 43% | 669 | 896 |
| | | | | | | 33% | 355 | 699 |
| | | | | | | 43% | 666 | 884 |
| | | | | | | 39% | 648 | 890 |
| | | | | | | 38% | 20 | 247 |
| | | | | | | 32% | 11 | 253 |
| | | | | | | 30% | 361 | 648 |
| | | | | | | 36% | 14 | 235 |
| | | | | | | 39% | 654 | 884 |
| | | | | | | 37% | 14 | 247 |
| | | | | | | 35% | 26 | 247 |
| | | | | | | 35% | 666 | 878 |
| | | | | | | 32% | 412 | 699 |
| | | | | | | 37% | 672 | 854 |
| | | | | | | 28% | 433 | 708 |
| | | | | | | 40% | 270 | 380 |
| | | | | | | 35% | 270 | 380 |
| | | | | | | 37% | 270 | 398 |
| | | | | | | 44% | 270 | 371 |
| | | | | | | 38% | 270 | 371 |
| | | | | | | 33% | 264 | 362 |
| | | | | | | 32% | 683 | 829 |
| | | | | | | 29% | 2 | 262 |
| | | | | | | 57% | 723 | 764 |
| | | | | | | 35% | 270 | 374 |
| | | | | | | 39% | 412 | 480 |
| HODFW19 | 971362 | 217 | HMMER | PFAM: Cadherin domain | PF00028 | 157.9 | 274 | 564 |
| | | | 2.1.1 | | | | | |
| | | | blastx.2 | (AF152513) | gb\|AAD43773.1\|AF1 | 97% | 82 | 1359 |
| | | | | protocadherin gamma A6 | 52513_1 | 33% | 91 | 903 |
| | | | | short form protein [Homo | | 29% | 103 | 957 |
| | | | | sapiens] | | 50% | 1349 | 1504 |
| HOHEC71 | 939540 | 218 | HMMER | PFAM: Cadherin | PF00028 | 66.56 | 6 | 308 |
| | | | 1.8 | | | | | |
| | | | blastx.2 | (AF152506) | gb\|AAD43767.1\|AF1 | 95% | 3 | 497 |
| | | | | protocadherin gamma A12 | 52506_1 | 33% | 6 | 422 |
| | | | | short form protein [Homo | | | | |
| | | | | sapiens] | | | | |
| HSDKJ91 | 734895 | 219 | HMMER | PFAM: Cadherin | PF00028 | 4.11 | 243 | 344 |
| | | | 1.8 | | | | | |
| HUCNE72 | 1162859 | 74 | blastx.14 | (AK000898) unnamed | gi\|7021853\|dbj\|BAA9 | 100% | 12 | 326 |
| | | | | protein product [Homo | 1414.11 | | | |
| | | | | sapiens] | | | | |
| HUCNE72 | 902725 | 220 | HMMER | PFAM: Cadherin | PF00028 | 5.17 | 526 | 570 |
| | | | 1.8 | | | | | |
| HCEOW20 | 944273 | 75 | HMMER | PFAM: Lectin C-type | PF00059 | 69.83 | 77 | 406 |
| | | | 1.8 | domain short and long | | | | |
| | | | | forms | | | | |
| | | | blastx.2 | (AC005531) similar to | gb\|AAD04729.1\| | 100% | 11 | 421 |
| | | | | lymphocyte early | | | | |
| | | | | activation antigen 1 | | | | |
| HCEOW20 | 946967 | 221 | HMMER | PFAM: Lectin C-type | PF00059 | 69.83 | 77 | 406 |
| | | | 1.8 | domain short and long | | | | |
| | | | | forms | | | | |
| | | | blastx.2 | (AC005531) similar to | gb\|AAD04729.1\| | 100% | 11 | 421 |
| | | | | lymphocyte early | | | | |
| | | | | activation antigen 1 | | | | |
| HCEOW20 | 949234 | 222 | HMMER | PFAM: Lectin C-type | PF00059 | 69.4 | 1625 | 1296 |
| | | | 1.8 | domain short and long | | | | |
| | | | | forms | | | | |
| | | | blastx.2 | (AC005531) similar to | gb\|AAD04729.1\| | 91% | 503 | 964 |
| | | | | lymphocyte early | | | | |
| | | | | activation antigen 1 | | | | |
| HDPJZ04 | 1228281 | 76 | blastx.14 | Dendritic cell-associated | sp\|AALF72710\| | 61% | 636 | 836 |
| | | | | | AAF72 | | | |
| | | | | C-type lectin-1. | 710 | 65% | 351 | 506 |
| | | | | | | 59% | 156 | 287 |
| HDPJZ04 | 951278 | 223 | HMMER | PFAM: Lectin C-type | PF00059 | 38.29 | 514 | 651 |
| | | | 1.8 | domain short and long | | | | |
| | | | | forms | | | | |
| | | | blastx.2 | (AF124841) C-type lectin- | gb\|AAF36777.1\|AF1 | 34% | 187 | 642 |
| | | | | like receptor-2 [Homo 1 | 24841_1 | | | |
| HCQCI06 | 915000 | 77 | HMMER | PFAM: Fibronectin type | PF00041 | 24.42 | 6 | 191 |
| | | | 1.8 | III domain | | | | |
| | | | blastx.14 | (AL117664) hypothetical | gi\|591226l\|emb\|CAB | 99% | 3 | 596 |
| | | | | protein [Homo sapiens] | 56034.1\| | 100% | 593 | 646 |
| HE8UT58 | 973153 | 78 | HMMER | PFAM: Fibronectin type | PF00041 | 15.44 | 72 | 191 |
| | | | 1.8 | III domain | | | | |
| | | | blastx.14 | (AL031290) dJ774I24.2 | gi\|3724250\|emb\|CAA | 54% | 87 | 656 |
| | | | | (NEURONAL | 20359.1\| | 53% | 9 | 53 |
| | | | | MIGRATION PROTEIN | | | | |
| | | | | ASTROTACTIN) [Homo | | | | |
| | | | | sapiens] | | | | |
| HFXJI27 | 975381 | 224 | HMMER | PFAM: Fibronectin type | PF00041 | 22 | 21 | 110 |
| | | | 2.1.1 | III domain | | | | |
| HLHCT68 | 764745 | 80 | HMMER | PFAM: Fibronectin type | PF00041 | 16.02 | 65 | 136 |
| | | | 1.8 | III domain | | | | |
| HMAMB94 | 910909 | 81 | HMMER | PFAM: Fibronectin type | PF00041 | 73.7 | 234 | 497 |
| | | | 2.1.1 | III domain | | | | |
| | | | blastx.14 | titin, cardiac muscle - | pir\|138344\|I38344 | 50% | 228 | 347 |
| | | | | human | 51% | 231 | 359 | |
| | | | | | | 44% | 204 | 359 |
| | | | | | | 45% | 228 | 359 |
| | | | | | | 46% | 228 | 350 |
| | | | | | | 42% | 231 | 365 |
| | | | | | | 48% | 228 | 350 |
| | | | | | | 30% | 234 | 497 |
| | | | | | | 43% | 228 | 350 |
| | | | | | | 29% | 228 | 488 |
| | | | | | | 46% | 228 | 350 |
| | | | | | | 40% | 228 | 368 |
| | | | | | | 41% | 228 | 350 |
| | | | | | | 38% | 231 | 380 |
| | | | | | | 32% | 228 | 365 |
| | | | | | | 35% | 243 | 386 |
| | | | | | | 35% | 213 | 398 |
| | | | | | | 35% | 270 | 500 |
| | | | | | | 26% | 273 | 500 |
| | | | | | | 28% | 270 | 503 |
| | | | | | | 41% | 228 | 350 |
| | | | | | | 30% | 270 | 482 |
| | | | | | | 25% | 210 | 488 |
| | | | | | | 50% | 243 | 350 |
| | | | | | | 31% | 228 | 359 |
| | | | | | | 36% | 228 | 359 |
| | | | | | | 41% | 234 | 350 |
| | | | | | | 27% | 270 | 497 |
| | | | | | | 27% | 270 | 521 |
| | | | | | | 39% | 228 | 341 |
| | | | | | | 32% | 228 | 374 |
| | | | | | | 51% | 270 | 350 |
| | | | | | | 41% | 222 | 350 |
| | | | | | | 36% | 108 | 254 |
| | | | | | | 38% | 108 | 257 |
| | | | | | | 35% | 225 | 350 |
| | | | | | | 39% | 132 | 254 |
| | | | | | | 41% | 270 | 371 |
| | | | | | | 34% | 243 | 371 |
| | | | | | | 30% | 3 | 197 |
| | | | | | | 43% | 270 | 365 |
| | | | | | | 32% | 243 | 371 |
| | | | | | | 38% | 243 | 350 |
| | | | | | | 30% | 192 | 350 |
| | | | | | | 38% | 120 | 245 |
| | | | | | | 27% | 3 | 197 |
| | | | | | | 25% | 3 | 251 |
| | | | | | | 40% | 99 | 203 |
| | | | | | | 27% | 3 | 206 |
| | | | | | | 25% | 3 | 254 |
| | | | | | | 46% | 273 | 350 |
| | | | | | | 32% | 105 | 254 |
| | | | | | | 39% | 120 | 248 |
| | | | | | | 38% | 270 | 371 |
| | | | | | | 38% | 270 | 371 |
| | | | | | | 45% | 105 | 203 |
| | | | | | | 34% | 114 | 254 |
| | | | | | | 29% | 18 | 248 |
| | | | | | | 50% | 270 | 359 |
| | | | | | | 34% | 243 | 374 |
| | | | | | | 33% | 243 | 350 |
| | | | | | | 36% | 243 | 350 |
| | | | | | | 34% | 210 | 359 |
| | | | | | | 48% | 117 | 203 |
| | | | | | | 26% | 3 | 197 |
| | | | | | | 38% | 120 | 269 |
| | | | | | | 37% | 264 | 350 |
| | | | | | | 32% | 210 | 359 |
| | | | | | | 26% | 3 | 254 |
| | | | | | | 35% | 105 | 257 |
| | | | | | | 38% | 270 | 371 |
| | | | | | | 30% | 93 | 257 |
| | | | | | | 24% | 3 | 185 |
| | | | | | | 39% | 270 | 368 |
| | | | | | | 33% | 273 | 371 |
| | | | | | | 53% | 273 | 350 |
| | | | | | | 42% | 273 | 350 |
| | | | | | | 34% | 114 | 251 |
| | | | | | | 37% | 93 | 254 |
| | | | | | | 38% | 111 | 212 |
| | | | | | | 40% | 111 | 230 |
| | | | | | | 40% | 270 | 350 |
| | | | | | | 40% | 270 | 350 |
| | | | | | | 50% | 291 | 368 |
| | | | | | | 36% | 243 | 350 |
| | | | | | | 37% | 114 | 257 |
| | | | | | | 27% | 3 | 185 |
| | | | | | | 39% | 273 | 371 |
| | | | | | | 30% | 243 | 350 |
| | | | | | | 35% | 234 | 359 |
| | | | | | | 34% | 105 | 254 |
| | | | | | | 23% | 3 | 245 |
| | | | | | | 33% | 243 | 359 |
| | | | | | | 28% | 234 | 371 |
| | | | | | | 27% | 3 | 257 |
| | | | | | | 33% | 114 | 248 |
| | | | | | | 28% | 3 | 203 |
| | | | | | | 52% | 297 | 359 |
| | | | | | | 45% | 291 | 350 |
| | | | | | | 34% | 123 | 245 |
| | | | | | | 26% | 51 | 245 |
| | | | | | | 31% | 120 | 242 |
| | | | | | | 27% | 3 | 197 |
| | | | | | | 23% | 3 | 242 |
| | | | | | | 31% | 120 | 260 |
| | | | | | | 41% | 96 | 203 |
| | | | | | | 40% | 273 | 353 |
| | | | | | | 35% | 234 | 350 |
| | | | | | | 30% | 234 | 371 |
| | | | | | | 40% | 411 | 500 |
| | | | | | | 34% | 123 | 245 |
| | | | | | | 41% | 93 | 200 |
| | | | | | | 43% | 105 | 200 |
| | | | | | | 39% | 123 | 245 |
| | | | | | | 38% | 120 | 245 |
| | | | | | | 36% | 270 | 359 |
| | | | | | | 33% | 270 | 368 |
| | | | | | | 33% | 243 | 350 |
| | | | | | | 39% | 408 | 506 |
| | | | | | | 31% | 105 | 257 |
| | | | | | | 26% | 3 | 203 |
| | | | | | | 25% | 3 | 203 |
| | | | | | | 23% | 3 | 245 |
| | | | | | | 40% | 270 | 350 |
| | | | | | | 36% | 270 | 359 |
| | | | | | | 64% | 270 | 320 |
| | | | | | | 43% | 291 | 359 |
| | | | | | | 38% | 273 | 350 |
| | | | | | | 48% | 288 | 368 |
| | | | | | | 37% | 273 | 359 |
| | | | | | | 30% | 108 | 254 |
| | | | | | | 29% | 228 | 350 |
| | | | | | | 36% | 270 | 368 |
| | | | | | | 30% | 108 | 254 |
| | | | | | | 50% | 123 | 206 |
| | | | | | | 28% | 3 | 200 |
| | | | | | | 38% | 150 | 257 |
| | | | | | | 50% | 288 | 353 |
| | | | | | | 33% | 243 | 350 |
| | | | | | | 32% | 99 | 209 |
| | | | | | | 23% | 3 | 203 |
| | | | | | | 38% | 87 | 203 |
| | | | | | | 42% | 291 | 368 |
| | | | | | | 37% | 270 | 350 |
| | | | | | | 28% | 270 | 374 |
| | | | | | | 30% | 243 | 359 |
| | | | | | | 46% | 114 | 191 |
| | | | | | | 25% | 3 | 191 |
| | | | | | | 32% | 411 | 512 |
| | | | | | | 42% | 291 | 368 |
| | | | | | | 33% | 270 | 350 |
| | | | | | | 35% | 408 | 491 |
| | | | | | | 32% | 108 | 254 |
| | | | | | | 40% | 123 | 233 |
| | | | | | | 31% | 123 | 245 |
| | | | | | | 34% | 132 | 254 |
| | | | | | | 37% | 120 | 206 |
| | | | | | | 22% | 3 | 185 |
| | | | | | | 38% | 105 | 197 |
| | | | | | | 36% | 117 | 206 |
| | | | | | | 37% | 123 | 242 |
| | | | | | | 42% | 123 | 206 |
| | | | | | | 31% | 132 | 254 |
| | | | | | | 33% | 123 | 257 |
| | | | | | | 37% | 120 | 206 |
| | | | | | | 29% | 123 | 245 |
| | | | | | | 32% | 3 | 86 |
| | | | | | | 41% | 411 | 482 |
| | | | | | | 37% | 408 | 488 |
| | | | | | | 26% | 27 | 227 |
| | | | | | | 23% | 114 | 251 |
| | | | | | | 38% | 108 | 200 |
| | | | | | | 21% | 27 | 245 |
| | | | | | | 32% | 384 | 512 |
| | | | | | | 45% | 120 | 185 |
| | | | | | | 31% | 123 | 257 |
| | | | | | | 24% | 351 | 500 |
| | | | | | | 40% | 120 | 185 |
| | | | | | | 29% | 93 | 254 |
| | | | | | | 34% | 123 | 254 |
| | | | | | | 34% | 123 | 254 |
| | | | | | | 25% | 372 | 512 |
| | | | | | | 32% | 3 | 77 |
| | | | | | | 30% | 387 | 512 |
| | | | | | | 38% | 120 | 197 |
| | | | | | | 30% | 3 | 80 |
| | | | | | | 37% | 408 | 503 |
| | | | | | | 39% | 120 | 203 |
| | | | | | | 33% | 3 | 74 |
| | | | | | | 47% | 183 | 245 |
| | | | | | | 30% | 111 | 278 |
| | | | | | | 40% | 120 | 185 |
| | | | | | | 39% | 120 | 203 |
| | | | | | | 38% | 120 | 197 |
| | | | | | | 37% | 123 | 203 |
| | | | | | | 31% | 123 | 263 |
| | | | | | | 32% | 3 | 77 |
| | | | | | | 38% | 405 | 482 |
| | | | | | | 47% | 402 | 458 |
| | | | | | | 21% | 99 | 251 |
| | | | | | | 40% | 21 | 65 |
| | | | | | | 40% | 3 | 62 |
| | | | | | | 38% | 3 | 65 |
| | | | | | | 40% | 120 | 185 |
| | | | | | | 27% | 108 | 260 |
| | | | | | | 32% | 123 | 206 |
| | | | | | | 26% | 120 | 242 |
| | | | | | | 35% | 147 | 248 |
| | | | | | | 29% | 123 | 245 |
| | | | | | | 33% | 3 | 74 |
| | | | | | | 29% | 3 | 74 |
| | | | | | | 27% | 3 | 89 |
| | | | | | | 45% | 189 | 248 |
| | | | | | | 35% | 3 | 62 |
| | | | | | | 36% | 3 | 77 |
| | | | | | | 26% | 123 | 260 |
| | | | | | | 31% | 180 | 320 |
| | | | | | | 30% | 3 | 71 |
| | | | | | | 39% | 192 | 260 |
| | | | | | | 40% | 120 | 185 |
| | | | | | | 44% | 3 | 56 |
| | | | | | | 31% | 3 | 68 |
| | | | | | | 30% | 561 | 638 |
| | | | | | | 27% | 528 | 638 |
| | | | | | | 28% | 408 | 503 |
| | | | | | | 21% | 120 | 242 |
| | | | | | | 30% | 162 | 260 |
| | | | | | | 34% | 183 | 260 |
| | | | | | | 34% | 150 | 245 |
| | | | | | | 44% | 585 | 638 |
| | | | | | | 30% | 531 | 638 |
| | | | | | | 36% | 3 | 77 |
| | | | | | | 33% | 3 | 56 |
| | | | | | | 28% | 372 | 488 |
| | | | | | | 30% | 3 | 80 |
| | | | | | | 31% | 411 | 497 |
| | | | | | | 52% | 135 | 185 |
| | | | | | | 36% | 451 | 507 |
| | | | | | | 42% | 218 | 274 |
| | | | | | | 37% | 123 | 203 |
| | | | | | | 40% | 129 | 188 |
| | | | | | | 42% | 3 | 59 |
| | | | | | | 28% | 3 | 77 |
| | | | | | | 33% | 183 | 263 |
| | | | | | | 33% | 198 | 260 |
| | | | | | | 38% | 454 | 507 |
| | | | | | | 38% | 454 | 507 |
| | | | | | | 100% | 228 | 245 |
| | | | | | | 38% | 123 | 185 |
| | | | | | | 36% | 123 | 188 |
| | | | | | | 32% | 408 | 482 |
| | | | | | | 58% | 228 | 263 |
| | | | | | | 25% | 27 | 191 |
| | | | | | | 34% | 120 | 197 |
| | | | | | | 35% | 370 | 411 |
| | | | | | | 57% | 72 | 113 |
| | | | | | | 28% | 3 | 65 |
| | | | | | | 29% | 3 | 74 |
| | | | | | | 36% | 3 | 59 |
| | | | | | | 31% | 408 | 512 |
| | | | | | | 38% | 123 | 185 |
| | | | | | | 30% | 411 | 500 |
| | | | | | | 31% | 405 | 500 |
| | | | | | | 66% | 234 | 260 |
| | | | | | | 22% | 27 | 185 |
| | | | | | | 58% | 228 | 263 |
| | | | | | | 33% | 180 | 260 |
| | | | | | | 33% | 9 | 62 |
| | | | | | | 28% | 3 | 65 |
| | | | | | | 36% | 3 | 77 |
| | | | | | | 28% | 408 | 482 |
| | | | | | | 53% | 147 | 191 |
| | | | | | | 66% | 234 | 260 |
| | | | | | | 66% | 234 | 260 |
| | | | | | | 66% | 234 | 260 |
| | | | | | | 60% | 231 | 260 |
| | | | | | | 26% | 96 | 209 |
| | | | | | | 38% | 245 | 283 |
| | | | | | | 26% | 218 | 274 |
| | | | | | | 50% | 603 | 638 |
| | | | | | | 42% | 27 | 68 |
| | | | | | | 38% | 3 | 65 |
| | | | | | | 83% | 228 | 245 |
| | | | | | | 83% | 228 | 245 |
| | | | | | | 27% | 3 | 101 |
| | | | | | | 47% | 411 | 461 |
| | | | | | | 66% | 234 | 260 |
| | | | | | | 83% | 228 | 245 |
| | | | | | | 34% | 183 | 260 |
| HNTAF23 | 910947 | 82 | HMMER | PFAM: Fibronectin type | PF00041 | 15.99 | 174 | 242 |
| | | | 1.8 | III domain | | | | |
| | | | blastx.14 | protein tyrosine | gi\|157812\|gb\|AAA28 | 46% | 99 | 239 |
| | | | | phosphatase (DLAR) | 668.1\| | | | |
| | | | | precursor [Drosophila | | | | |
| | | | | melanogaster] | | | | |
| HTEED80 | 849075 | 83 | HMMER | PFAM: Fibronectin type | PF00041 | 12.84 | 521 | 808 |
| | | | 1.8 | III domain | | | | |
| | | | blastx.2 | (AK001550) unnamed | dbj\|BAA91751.1\| | 99% | 254 | 850 |
| | | | | protein product [Homo | | 95% | 1 | 267 |
| | | | | sapiens] | | 29% | 4 | 180 |
| HTLAQ18 | 811792 | 84 | HMMER | PFAM: Fibronectin type | PF00041 | 31.34 | 56 | 331 |
| | | | 1.8 | III domain | | | | |
| HNHAF61 | 1093210 | 85 | blastx.2 | (AF152473) | gb\|AAD43734.1\|AF1 | 86% | 82 | 744 |
| | | | | protocadherin alpha C1 | 52473_1 | 47% | 5 | 373 |
| | | | | short form protein [Homo | | 30% | 88 | 726 |
| | | | | sapiens] | | 44% | 2 | 76 |
| | | | | | | 97% | 946 | 731 |
| | | | | | | 93% | 1029 | 943 |
| | | | | | | 36% | 943 | 779 |
| | | | | | | 41% | 1023 | 952 |
| HNHAF61 | 742116 | 225 | HMMER | PFAM: Cadherin | PF00028 | 46.67 | 330 | 461 |
| | | | 1.8 | | | | | |
| | | | blastx.2 | (AF152473) | gb\|AAD43734.1\|AF1 | 75% | 81 | 677 |
| | | | | protocadherin alpha C1 | 52473_1 | 84% | 173 | 364 |
| | | | | short form protein [Homo | | 33% | 87 | 686 |
| | | | | sapiens] | | 93% | 1 | 84 |
| | | | | | | 40% | 10 | 75 |
| HNHAF61 | 955094 | 226 | blastx.14 | (AF152303) | gi\|5456892\|gb\|AAD4 | 98% | 325 | 1071 |
| | | | | protocadherin alpha C1 | 3697.1_1 | 40% | 715 | 987 |
| | | | | [Homo sapiens] | | 42% | 499 | 660 |
| | | | | | | 32% | 778 | 1023 |
| | | | | | | 37% | 724 | 867 |
| | | | | | | 100% | 225 | 275 |
| | | | | | | 77% | 176 | 229 |
| | | | | | | 30% | 496 | 684 |
| | | | | | | 89% | 269 | 325 |
| | | | | | | 35% | 895 | 1011 |
| | | | | | | 40% | 568 | 663 |
| | | | | | | 36% | 717 | 791 |
| | | | | | | 50% | 499 | 540 |
| HNTSN26 | 1154066 | 86 | blastx.14 | (AF152308) | 93% | 12 | 941 | |
| | | | | | gi\|5456902\|gb\|AAD4 | | | |
| | | | | protocadherin alpha 12 | 3702.1\| | 97% | 1109 | 1318 |
| | | | | [Homo sapiens] | | 37% | 27 | 224 |
| | | | | | | 44% | 63 | 224 |
| | | | | | | 35% | 267 | 446 |
| | | | | | | 100% | 1053 | 1109 |
| | | | | | | 38% | 15 | 224 |
| | | | | | | 45% | 309 | 434 |
| | | | | | | 42% | 309 | 434 |
| | | | | | | 28% | 630 | 755 |
| | | | | | | 31% | 651 | 755 |
| | | | | | | 26% | 606 | 755 |
| | | | | | | 38% | 6 | 83 |
| | | | | | | 33% | 483 | 581 |
| | | | | | | 56% | 528 | 575 |
| | | | | | | 36% | 513 | 578 |
| | | | | | | 42% | 1095 | 1136 |
| | | | | | | 60% | 1181 | 1210 |
| HNTSN26 | 910730 | 227 | HMMER | PFAM: Cadherin | PF00028 | 18.9 | 120 | 218 |
| | | | 1.8 | | | | | |
| | | | blastx.14 | (AF152308) | gi\|5456902\|gb\|AAD4 | 98% | 102 | 284 |
| | | | | protocadherin alpha 12 | 3702.1\| | 100% | 1 | 63 |
| | | | | [Homo sapiens] | | 50% | 159 | 236 |
| | | | | | | 33% | 16 | 60 |
| | | | | | | 45% | 4 | 63 |
| HPWBS63 | 1153910 | 87 | blastx.14 | B0034.3 gene product | gi\|746589\|gb\|AAC38 | 36% | 193 | 375 |
| | | | | [Caenorhabditis elegans] | 816.1\| | 42% | 31 | 129 |
| HPWBS63 | 910750 | 228 | HMMER | PFAM: Cadherin | PF00028 | 35.1 | 96 | 329 |
| | | | 1.8 | | | | | |
| | | | blastx.2 | B0034.3 gene product | gb\|AAC38816.1\| | 35% | 33 | 821 |
| | | | | [Caenorhabditis elegans] | | | | |
| HBODA38 | 923456 | 88 | HMMER | PFAM: Fibronectin type | PF00041 | 31.21 | 418 | 648 |
| | | | 1.8 | III domain | | | | |
| | | | blastx.14 | midline 2 protein [Mus | gi\|5912495\|emb\|CAB | 23% | 2 | 364 |
| | | | | musculus] | 56170.1\| | 36% | 661 | 783 |
| | | | | | | 35% | 1090 | 1200 |
| | | | | | | 32% | 1261 | 1407 |
| | | | | | | 37% | 859 | 939 |
| | | | | | | 32% | 400 | 483 |
| HEONO59 | 741361 | 89 | HMMER | PFAM: Fibronectin type | PF00041 | 39.4 | 508 | 582 |
| | | | 2.1.1 | III domain | | | | |
| | | | blastx.2 | (AF117210) host cell | gb\|AAD27814.1\|AF1 | 99% | 331 | 702 |
| | | | | factor 2 [Homo sapiens] | 17210_1 | 97% | 23 | 253 |
| | | | | | | 97% | 707 | 847 |
| HSSJM44 | 871067 | 90 | HMMER | PFAM: Fibronectin type | PF00041 | 8.5 | 694 | 936 |
| | | | 1.8 | III domain | | | | |
| HEQAY32 | 869178 | 91 | HMMER | PFAM: Fibronectin type | PF00041 | 12.25 | 736 | 867 |
| | | | 1.8 | III domain | | | | |
| HAMFL82 | 910074 | 92 | HMMER | PFAM: C2 domain | PF00168 | 73.4 | 9 | 212 |
| | | | 1.8 | | | | | |
| | | | blastx.14 | Phospholipase C [Homo | gi\|780122\|dbj\|BAA07 | 80% | 3 | 317 |
| | | | | sapiens] | 688.1\| | | | |
| HCE5178 | 934531 | 93 | HMMER | PFAM:C2 domain | PF00168 | 49.14 | 213 | 413 |
| | | | 1.8 | | | | | |
| | | | blastx.2 | ‘rabphilin-3A’ [Bos taurus] | dbj\|BAA02780.1\| | 83% | 135 | 404 |
| | | | | | | 61% | 3 | 41 |
| HCE5J51 | 1195672 | 94 | blastx.14 | SRG1. | sp\|P97610\|P97610 | 98% | 110 | 802 |
| HCE5J51 | 934524 | 229 | HMMER | PFAM: C2 domain | PF00168 | 82.59 | 338 | 604 |
| | | | 1.8 | | | | | |
| | | | blastx.14 | Srg1 [Rattus norvegicus] | gi\|1772658\|gb\|AAC5 | 94% | 12 | 302 |
| | | | | | 3019.1\| | 86% | 293 | 622 |
| | | | | | | 88% | 625 | 702 |
| HCEEN06 | 1150643 | 95 | blastx.14 | (AB025258) granuphilin-a | gi\|5926736\|dbj\|BAA8 | 41% | 486 | 292 |
| | | | | [Mus musculus] | 4656.1\| | 48% | 234 | 130 |
| | | | | | | 30% | 471 | 364 |
| | | | | | | 47% | 540 | 484 |
| | | | | | | 42% | 630 | 553 |
| | | | | | | 42% | 345 | 304 |
| HCEEN06 | 878658 | 230 | HMMER | PFAM: C2 domain | PF00168 | 51.79 | 203 | 466 |
| | | | 1.8 | | | | | |
| HCEPU56 | 920347 | 96 | HMMER | PFAM: C2 domain | PF00168 | 3.93 | 243 | 293 |
| | | | 1.8 | | | | | |
| HDPKI83 | 883382 | 97 | HMMER | PFAM: C2 domain | PF00168 | 13.47 | 530 | 601 |
| | | | 1.8 | | | | | |
| HDPRU43 | 1221959 | 98 | blastx.14 | PUTATIVE RASGAP- | sp\|O433741\|O43374 | 90% | 2080 | 2550 |
| | | | | ACTIVATING-LIKE | | 64% | 1997 | 2089 |
| | | | | PROTEIN. | | | | |
| HDPRU43 | 909841 | 231 | HMMER | PFAM: C2 domain | PF00168 | 82.11 | 58 | 303 |
| | | | 1.8 | | | | | |
| HE8QH09 | 1146260 | 99 | blastx.14 | (AB000893) | gi\|1840399\|dbj\|BAA1 | 89% | 6 | 836 |
| | | | | synaptotagmin 3 [Mus | 9204.1\| | | | |
| | | | | musculus] | | | | |
| HE8QH09 | 934532 | 232 | HMMER | PFAM: C2 domain | PF00168 | 168.2 | 77 | 337 |
| | | | 2.1.1 | | | | | |
| | | | blastx.14 | (AB000893) | gi\|1840399\|dbj\|BAA1 | 92% | 56 | 568 |
| | | | | synaptotagmin 3 [Mus | 9204.1\| | 98% | 564 | 830 |
| | | | | musculus] | | 42% | 407 | 556 |
| | | | | | | 33% | 573 | 731 |
| | | | | | | 32% | 170 | 328 |
| | | | | | | 34% | 56 | 205 |
| | | | | | | 100% | 21 | 53 |
| | | | | | | 39% | 430 | 498 |
| HE8UX76 | 1161437 | 100 | (AB- | gi\|6136784\|dbj\|BAA8 | 94% | 438 | 1385 | |
| | | blastx. | 026803) | synaptotagmin VI [Mus | 5775.11 | 91% | 99 | 455 |
| | | 14 | | musculus] | | | | |
| HE8UX76 | 767871 | 233 | HMMER | PFAM: C2 domain | PF00168 | 7.23 | 592 | 636 |
| | | | 1.8 | | | | | |
| HEGAP32 | 851207 | 101 | HMMER | PFAM: C2 domain | PF00168 | 33.03 | 11 | 172 |
| | | | 1.8 | | | | | |
| HETJX04 | 927120 | 102 | HMMER | PFAM: C2 domain | PF00168 | 150.4 | 9 | 260 |
| | | | 2.1.1 | | | | | |
| | | | blastx.2 | (AB025258) granuphilin-a | dbj\|BAA84656.1\| | 94% | 6 | 683 |
| | | | | [Mus musculus] | | 57% | 685 | 831 |
| | | | | | | 48% | 719 | 859 |
| HFAAX29 | 934540 | 103 | HMMER | PFAM: C2 domain | PF00168 | 115.2 | 194 | 463 |
| | | | 2.1.1 | | | | | |
| | | | blastx.14 | (AF000423) | gi\|2130632\|gb\|AAB5 | 98% | 8 | 550 |
| | | | | synaptotagmin XI [Rattus | 8344.1\| | 35% | 365 | 490 |
| | | | | norvegicus] | | 25% | 149 | 313 |
| | | | | | | 47% | 311 | 367 |
| HFIAH37 | 615597 | 234 | HMMER | PFAM: C2 domain | PF00168 | 4.22 | 241 | 291 |
| | | | 1.8 | | | | | |
| HFIVB68 | 752981 | 105 | HMMER | PFAM: C2 domain | PF00168 | 35.53 | 406 | 570 |
| | | | 1.8 | | | | | |
| HFPBW22 | 1151651 | 106 | blastx.14 | B/K protein [Rattus | gi\|1006785\|gb\|AAC5 | 54% | 446 | 294 |
| | | | | norvegicus] | 2379.1\| | | | |
| HFPBW22 | 750631 | 235 | HMMER | PFAM: C2 domain | PF00168 | 19 | 323 | 430 |
| | | | 1.8 | | | | | |
| HFPHI62 | 934529 | 107 | HMMER | PFAM: C2 domain | PF00168 | 106.44 | 27 | 293 |
| | | | 1.8 | | | | | |
| | | | blastx.14 | rabphilin-3A - mouse | pir\|JX0338\|JX0338 | 90% | 3 | 410 |
| HFTDY67 | 745221 | 108 | HMMER | PFAM: C2 domain | PF00168 | 20.07 | 4 | 144 |
| | | | 1.8 | | | | | |
| HFXLC69 | 1161235 | 109 | blastx.14 | (AF065215) cytosolic | gi\|3811347\|gb\|AAC7 | 100% | 166 | 29 |
| | | | | phospholipase A2 beta | 8836.1\| | 96% | 534 | 460 |
| | | | | [Homo sapiens] | | 33% | 1091 | 993 |
| HFXLC69 | 692773 | 236 | HMMER | PFAM: C2 domain | PF00168 | 17.77 | 84 | 200 |
| | | | 1.8 | | | | | |
| HHEFQ42 | 934527 | 237 | HMMER | PFAM: C2 domain | PF00168 | 128.8 | 203 | 472 |
| | | | 2.1.1 | | | | | |
| | | | blastx.14 | (AB025258) granuphilin-a | gi\|5926736\|dbj\|BAA8 | 40% | 128 | 505 |
| | | | | [Mus musculus] | 4656.1\| | 57% | 887 | 1057 |
| | | | | | | 46% | 695 | 892 |
| | | | | | | 39% | 707 | 820 |
| | | | | | | 31% | 263 | 376 |
| | | | | | | 46% | 644 | 682 |
| | | | | | | 38% | 572 | 610 |
| | | | | | | 75% | 107 | 130 |
| HKAAR71 | 863023 | 111 | HMMER | PFAM:C2 domain | PF00168 | 16.26 | 309 | 551 |
| | | | 1.8 | | | | | |
| | | | blastx.2 | (AJ242972) TOLLIP | emb\|CAB58118.1\| | 94% | 147 | 959 |
| | | | | protein [Homo sapiens] | | | | |
| HLHBC30 | 910079 | 112 | HMMER | PFAM:C2 domain | PF00168 | 104.78 | 45 | 305 |
| | | | 1.8 | | | | | |
| | | | blastx.14 | 1-phosphatidylinositol- | pir\|S14113\|S14113 | 83% | 9 | 332 |
| | | | | 4,5-bisphosphate | | 74% | 408 | 512 |
| | | | | phosphodiesterase 1 | | 85% | 155 | 175 |
| HLQDC55 | 934528 | 113 | HMMER | PFAM: C2 domain | PF00168 | 81.1 | 1 | 216 |
| | | | 2.1.1 | | | | | |
| | | | blastx.2 | (AK002037) unnamed | dbj\|BAA92048.1\| | 46% | 148 | 450 |
| | | | | protein product [Homo | | 32% | 1 | 234 |
| | | | | sapiens] | | 57% | 432 | 494 |
| HMCFS02 | 969326 | 114 | HMMER | PFAM: C2 domain | PF00168 | 8.05 | 347 | 457 |
| | | | 1.8 | | | | | |
| HMEGH46 | 887791 | 115 | HMMER | PFAM:C2 domain | PF00168 | 12.81 | 10 | 78 |
| | | | 1.8 | | | | | |
| UMSBZ24 | 678707 | 116 | HMMER | PFAM: C2 domain | PF00168 | 35.46 | 8 | 181 |
| | | | 1.8 | | | | | |
| HOHBN82 | 724322 | 117 | HMMER | PFAM: C2 domain | PF00168 | 49.95 | 96 | 347 |
| | | | 1.8 | | | | | |
| HPFCU80 | 685294 | 118 | HMMER | PFAM: C2 domain | PF00168 | 4 | 261 | 296 |
| | | | 1.8 | | | | | |
| HPJCR33 | 966758 | 119 | HMMER | PFAM:C2 domain | PF00168 | 31.15 | 13 | 267 |
| | | | 1.8 | | | | | |
| | | | blastx.14 | (AF169310) E3 ubiquitin | gi\|5815135\|gb\|AAD5 | 87% | 7 | 375 |
| | | | | ligase SMURF1 [Xenopus | 2564.1\|AF169310_1 | | | |
| | | | | laevis] | | | | |
| USCKS55 | 961074 | 238 | HMMER | PFAM: C2 domain | PF00168 | 4.41 | 931 | 993 |
| | | | 1.8 | | | | | |
| HSPBQ12 | 884004 | 239 | HMMER | PFAM: C2 domain | PF00168 | 42.06 | 352 | 624 |
| | | | 1.8 | | | | | |
| HSYBX32 | 909846 | 122 | HMMER | PFAM: C2 domain | PF00168 | 41.14 | 46 | 189 |
| | | | 1.8 | | | | | |
| | | | blastx.14 | (AC004084) similar to | gi\|2822157\|gb\|AAB9 | 98% | 49 | 228 |
| | | | | GTPase-activating | 7935.1\| | | | |
| | | | | proteins; 1 | | | | |
| HTAHB43 | 909845 | 123 | HMMER | PFAM: GTPase-activator | PF00616 | 61.3 | 519 | 731 |
| | | | 2.1.1 | protein for Ras-like | | | | |
| | | | | GTPase | | | | |
| | | | blastx.14 | (AC004084) similar to | gi\|2822157\|gb\|AAB9 | 97% | 39 | 860 |
| | | | | GTPase-activating | 7935.1\| | 100% | 1 | 33 |
| | | | | proteins; 1 | | 34% | 30 | 116 |
| HTBAB41 | 867287 | 124 | HMMER | PFAM: C2 domain | PF00168 | 5.32 | 89 | 157 |
| | | | 1.8 | | | | | |
| HTEDF74 | 522982 | 125 | HMMER | PFAM: C2 domain | PF00168 | 6.98 | 189 | 233 |
| | | | 1.8 | | | | | |
| HTEFO45 | 1150975 | 126 | blastx.14 | Munc13-3 [Rattus | gi\|763306\|gb\|AAB3 | 91% | 920 | 387 |
| | | | | norvegicus] | 9720.1\| | | | |
| HTEFO45 | 723446 | 240 | HMMER | PFAM: C2 domain | PF00168 | 30.64 | 111 | 383 |
| | | | 1.8 | | | | | |
| HTNGF69 | 933614 | 241 | HMMER | PFAM:C2 domain | PF00168 | 3.94 | 588 | 659 |
| | | | 1.8 | | | | | |
| HTXRA13 | 959622 | 128 | HMMER | PFAM: C2 domain | PF00168 | 51.3 | 540 | 809 |
| | | | 2.1.1 | | | | | |
| HUSHB54 | 928054 | 129 | HMMER | PFAM:C2 domain | PF00168 | 20.52 | 275 | 355 |
| | | | 1.8 | | | | | |
| HWHQC94 | 715096 | 130 | HMMER | PFAM: C2 domain | PF00168 | 4.17 | 214 | 300 |
| | | | 1.8 | | | | | |
| HWLHK29 | 876064 | 242 | HMMER | PFAM: C2 domain | PF00168 | 16.97 | 222 | 488 |
| | | | 1.8 | | | | | |
| HYABL89 | 786157 | 132 | HMMER | PFAM:C2 domain | PF00168 | 6.05 | 270 | 317 |
| | | | 1.8 | | | | | |
| HAIDO94 | 793201 | 243 | HMMER | PFAM: Laminin B | PF00052 | 1 | 75 | 7 |
| | | | 1.8 | (Domain IV) | | | | |
| HBJIH60 | 930448 | 244 | HMMER | PFAM: Laminin B | PF00052 | 1.57 | 181 | 204 |
| | | | 1.8 | (Domain IV) | | | | |
| HCE3P22 | 674862 | 245 | HMMER | PFAM: Laminin B | PF00052 | 1.99 | 52 | 78 |
| | | | 1.8 | (Domain IV) | | | | |
| HCESL27 | 1104541 | 136 | blastx.14 | fat protein [Drosophila | gi\|157409\|gb\|AAA28 | 39% | 451 | 368 |
| | | | | melanogaster] | 530.1\| | 43% | 77 | 9 |
| | | | | | | 35% | 155 | 63 |
| | | | | | | 57% | 340 | 299 |
| | | | | | | 40% | 241 | 176 |
| | | | | | | 46% | 314 | 276 |
| HCE5L27 | 574778 | 246 | HMMER | PFAM: Laminin B | PF00052 | 0.68 | 90 | 113 |
| | | | 1.8 | (Domain IV) | | | | |
| HCHNW48 | 1103908 | 137 | blastx.14 | (AK001847) unnamed | gi\|7023369\|dbj\|BAA9 | 91% | 464 | 354 |
| | | | | protein product [Homo | 1939.1\| | | | |
| | | | | sapiens] | | | | |
| HCHNW48 | 862478 | 247 | HMMER | PFAM: Laminin B | PF00052 | 1.52 | 230 | 289 |
| | | | 1.8 | (Domain IV) | | | | |
| HCUEU74 | 576538 | 138 | HMMER | PFAM: Laminin B | PF00052 | 1.65 | 41 | 58 |
| | | | 1.8 | (Domain IV) | | | | |
| HDPCM62 | 454740 | 139 | HMMER | PFAM: Laminin B | PF00052 | 2.03 | 152 | 208 |
| | | | 1.8 | (Domain IV) | | | | |
| HDPYA61 | 741586 | 248 | HMMER | PFAM: Laminin B | PF00052 | 0.85 | 130 | 228 |
| | | | 1.8 | (Domain IV) | | | | |
| HDSAK19 | 933455 | 249 | HMMER | PFAM:Laminin B | PF00052 | 0.71 | 1499 | 1513 |
| | | | 1.8 | (Domain IV) | | | | |
| HDTJI37 | 799834 | 250 | HMMER | PFAM: Laminin B | PF00052 | 2.02 | 386 | 466 |
| | | | 1.8 | (Domain IV) | | | | |
| HE2IO96 | 796075 | 143 | HMMER | PFAM: Laminin B | PF00052 | 1.26 | 38 | 121 |
| | | | 1.8 | (Domain IV) | | | | |
| HEPCP91 | 1142257 | 144 | blastx.14 | neuronal-STOP protein | gi\|3171934\|emb\|CAA | 75% | 9 | 491 |
| | | | | [Mus musculus] | 75930.1\| | 73% | 1123 | 1467 |
| | | | | | | 45% | 408 | 845 |
| | | | | | | 39% | 420 | 845 |
| | | | | | | 33% | 321 | 842 |
| | | | | | | 46% | 1120 | 1392 |
| | | | | | | 50% | 408 | 650 |
| | | | | | | 47% | 1132 | 1389 |
| | | | | | | 33% | 408 | 845 |
| | | | | | | 40% | 1123 | 1395 |
| | | | | | | 35% | 408 | 800 |
| | | | | | | 35% | 405 | 830 |
| | | | | | | 47% | 1135 | 1389 |
| | | | | | | 37% | 438 | 755 |
| | | | | | | 40% | 408 | 650 |
| | | | | | | 38% | 567 | 818 |
| | | | | | | 38% | 1129 | 1392 |
| | | | | | | 38% | 504 | 785 |
| | | | | | | 40% | 1126 | 1374 |
| | | | | | | 41% | 1156 | 1389 |
| | | | | | | 39% | 582 | 845 |
| | | | | | | 38% | 1129 | 1392 |
| | | | | | | 37% | 561 | 845 |
| | | | | | | 42% | 1177 | 1389 |
| | | | | | | 42% | 1129 | 1377 |
| | | | | | | 38% | 393 | 620 |
| | | | | | | 41% | 1120 | 1374 |
| | | | | | | 34% | 396 | 719 |
| | | | | | | 37% | 1132 | 1380 |
| | | | | | | 43% | 1120 | 1314 |
| | | | | | | 47% | 1213 | 1389 |
| | | | | | | 38% | 1147 | 1374 |
| | | | | | | 37% | 951 | 1157 |
| | | | | | | 39% | 1117 | 1305 |
| | | | | | | 32% | 1120 | 1377 |
| | | | | | | 31% | 951 | 1199 |
| | | | | | | 27% | 957 | 1235 |
| | | | | | | 27% | 567 | 845 |
| | | | | | | 39% | 951 | 1103 |
| | | | | | | 29% | 339 | 635 |
| | | | | | | 47% | 1288 | 1395 |
| | | | | | | 26% | 294 | 557 |
| | | | | | | 29% | 984 | 1235 |
| | | | | | | 40% | 969 | 1103 |
| | | | | | | 42% | 1120 | 1233 |
| | | | | | | 45% | 954 | 1073 |
| | | | | | | 35% | 969 | 1103 |
| | | | | | | 35% | 951 | 1103 |
| | | | | | | 44% | 1026 | 1139 |
| | | | | | | 39% | 1111 | 1233 |
| | | | | | | 31% | 996 | 1157 |
| | | | | | | 33% | 969 | 1076 |
| | | | | | | 34% | 951 | 1046 |
| | | | | | | 46% | 1002 | 1079 |
| | | | | | | 27% | 333 | 518 |
| | | | | | | 42% | 705 | 788 |
| | | | | | | 32% | 729 | 821 |
| | | | | | | 23% | 705 | 845 |
| | | | | | | 47% | 1023 | 1091 |
| | | | | | | 60% | 606 | 650 |
| | | | | | | 35% | 540 | 623 |
| | | | | | | 29% | 12 | 83 |
| | | | | | | 35% | 1159 | 1242 |
| | | | | | | 16% | 416 | 592 |
| | | | | | | 31% | 969 | 1064 |
| | | | | | | 25% | 1077 | 1193 |
| | | | | | | 23% | 729 | 845 |
| | | | | | | 32% | 1309 | 1392 |
| | | | | | | 27% | 476 | 574 |
| HEPCP91 | 679234 | 251 | HMMER | PFAM: Laminin B | PF00052 | 2.52 | 199 | 297 |
| | | | 1.8 | (Domain IV) | | | | |
| HFGAL44 | 715764 | 252 | HMMER | PFAM: Laminin B | PF00052 | 0.94 | 122 | 154 |
| | | | 1.8 | (Domain IV) | | | | |
| HFIUM16 | 661845 | 146 | HMMER | PFAM: Laminin B | PF00052 | 2.24 | 150 | 206 |
| | | | 1.8 | (Domain IV) | | | | |
| HFPAC33 | 1024217 | 147 | blastx.14 | ORF YOR240w | gi\|1420548\|emb\|CAA | 48% | 407 | 523 |
| | | | | [Saccharomyces | 99461.1\| | 62% | 309 | 356 |
| | | | | cerevisiae] | | 47% | 46 | 102 |
| HFPAC33 | 537724 | 253 | HMMER | PFAM: Laminin B | PF00052 | 3.45 | 246 | 353 |
| | | | 1.8 | (Domain IV) | | | | |
| HFXBJ04 | 1068099 | 148 | blastx.14 | similar to [SwissProt | gi\|1799725\|dbj\|BAA1 | 100% | 254 | 18 |
| | | | | Accession Number | 6188.1\| | 92% | 300 | 259 |
| | | | | P39199] [Escherichia coli] | | | | |
| HFXBJ04 | 854511 | 254 | HMMER | PFAM: Laminin B | PF00052 | 0.74 | 214 | 327 |
| | | | 1.8 | (Domain IV) | | | | |
| HHENY30 | 953829 | 255 | HMMER | PFAM: Laminin B | PF00052 | 2 | 223 | 318 |
| | | | 1.8 | (Domain IV) | | | | |
| | | | blastx.14 | (AC004877) sco-spondin- | gi\|3638957\|gb\|AAC3 | 43% | 195 | 242 |
| | | | | mucin-like; similar to | 6301.1\| | 53% | 160 | 198 |
| | | | | P98167 1 sapiens] | | | | |
| HHFGV79 | 573532 | 150 | HMMER | PFAM: Laminin B | PF00052 | 2.98 | 116 | 160 |
| | | | 1.8 | (Domain IV) | | | | |
| HHSAL11 | 967685 | 151 | HMMER | PFAM: Laminin B | PF00052 | 0.93 | 295 | 426 |
| | | | 1.8 | (Domain IV) | | | | |
| | | | blastx.14 | gag polyprotein - feline | pir\|A03938\|FOMVM | 29% | 208 | 402 |
| | | | | sarcoma virus (strain | D | 37% | 404 | 490 |
| | | | | McDonough) | | 29% | 8 | 79 |
| HKADH21 | 670821 | 256 | HMMER | PFAM: Laminin B | PF00052 | 0.93 | 281 | 385 |
| | | | 1.8 | (Domain IV) | | | | |
| HLDON90 | 788891 | 257 | HMMER | PFAM: Laminin B | PF00052 | 1.99 | 77 | 100 |
| | | | 1.8 | (Domain IV) | | | | |
| HLTAZ78 | 1150875 | 154 | blastx.14 | similar to a C. elegans | gi\|1504030\|dbj\|BAA1 | 100% | 9 | 1100 |
| | | | | protein encoded in cosmid | 3214.1\| | | | |
| | | | | K12D12(Z49069) [Homo | | | | |
| | | | | sapiens] | | | | |
| HLTAZ78 | 946233 | 258 | HMMER | PFAM: Laminin B | PF00052 | 0.66 | 435 | 449 |
| | | | 1.8 | (Domain IV) | | | | |
| | | | blastx.2 | similar to a C. elegans | dbj\|BAA13214.1\| | 99% | 12 | 560 |
| | | | | protein encoded in cosmid | | 95% | 560 | 625 |
| | | | | K12D12(Z49069) [Homo | | | | |
| | | | | sapiens] | | | | |
| HMMAL17 | 662379 | 155 | HMMER | PFAM: Laminin B | PF00052 | 2.03 | 172 | 228 |
| | | | 1.8 | (Domain IV) | | | | |
| HOFMB78 | 1193496 | 156 | blastx.14 | ribosomal protein L7a, | pir\|S19717\|R5HU7A | 100% | 197 | 502 |
| | | | | cytosolic - human | | 100% | 749 | 862 |
| HOFMB78 | 572941 | 259 | HMMER | PFAM: Laminin B | PF00052 | 1.62 | 286 | 330 |
| | | | 1.8 | (Domain IV) | | | | |
| | | | blastx.2 | ribosomal protein L7a | gb\|AAA60282.1\| | 72% | 49 | 399 |
| | | | | large subunit [Homo | | 61% | 236 | 397 |
| | | | | sapiens] | | 50% | 44 | 91 |
| HSDAG13 | 968438 | 157 | HMMER | PFAM: Laminin B | PF00052 | 1.57 | 9 | 116 |
| | | | 1.8 | (Domain IV) | | | | |
| | | | blastx.14 | ORF_f356 [Escherichia | gi\|305002\|gb\|AAB0 | 97% | 3 | 212 |
| | | | | coli] | 3031.1\| | | | |
| HSOAM403 | 925006 | 260 | HMMER | PFAM: Laminin B | PF00052 | 0.82 | 204 | 97 |
| | | | 1.8 | (Domain IV) | | | | |
| HT4CL71 | 954685 | 264 | HMMER | PFAM: Laminin B | PF00052 | 1.61 | 68 | 130 |
| | | | 1.8 | (Domain IV) | | | | |
| | | | blastx.14 | (AF108139) radical fringe | gi\|4959370\|gb\|AAD3 | 98% | 289 | 2 |
| | | | | [Homo sapiens] | 4321.1\|AF108139_1 | | | |
| HTDAB58 | 915723 | 265 | HMMER | PFAM: Laminin B | PF00052 | 2.77 | 689 | 751 |
| | | | 1.8 | (Domain IV) | | | | |
| | | | blastx.14 | (AL110249) hypothetical | gi\|5817200\|emb\|CAB | 100% | 18 | 161 |
| | | | | protein [Homo sapiens] | 53697.1\| | | | |
| HTJAC60 | 1219940 | 161 | blastx.14 | EG:BACN33B1.2 | sp\|Q9U1M2\|Q9U1M2 | 54% | 504 | 992 |
| | | | | PROTEIN (CG2766 | | 34% | 120 | 524 |
| | | | | PROTEIN) (CG2716 | | | | |
| | | | | PROTEIN). | | | | |
| HTJAC60 | 943159 | 266 | HMMER | PFAM: Laminin B | PF00052 | 2.13 | 126 | 329 |
| | | | 1.8 | (Domain IV) | | | | |
| | | | blastx.2 | (AL133506)/ | emb\|CAB65846.1\| | 33% | 108 | 551 |
| | | | | prediction = (method: | | | | |
| | | | | ““genscan””, version: | | | | |
| | | | | ““1.0””, 1 1 1 5prime s | | | | |
| HTLGG79 | 792317 | 267 | HMMER | PFAM: Laminin B | PF00052 | 1.94 | 67 | 93 |
| | | | 1.8 | (Domain IV) | | | | |
| HTLJA13 | 785622 | 268 | HMMER | PFAM: Laminin B | PF00052 | 3.68 | 37 | 96 |
| | | | 1.8 | (Domain IV) | | | | |
| HTXJY67 | 751513 | 269 | HMMER | PFAM: Laminin B | PF00052 | 1.12 | 168 | 197 |
| | | | 1.8 | (Domain IV) | | | | |
| HUSIJ47 | 1124748 | 165 | blastx.14 | pyruvate dehydrogenase | gi\|414797\|gb\|AAA30 | 94% | 71 | 559 |
| | | | | phosphatase [Bos taurus] | 697.1\| | 56% | 3 | 50 |
| HUSIJ47 | 933647 | 270 | HMMER | PFAM: Laminin B | PF00052 | 0.95 | 299 | 397 |
| | | | 1.8 | (Domain IV) | | | | |
| | | | blastx.14 | pyruvate dehydrogenase | gi\|414797\|gb\|AAA30 | 91% | 71 | 481 |
| | | | | phosphatase [Bos taurus] | 697.1\| | 56% | 3 | 50 |
| HWAFS34 | 1106346 | 166 | blastx.14 | envelope protein [Homo | gi\|1196425\|gb\|AAA8 | 70% | 436 | 335 |
| | | | | sapiens] | 8027.1\| | 40% | 554 | 405 |
| HWAFS34 | 953968 | 271 | HMMER | PFAM: Laminin B | PF00052 | 2.36 | 219 | 251 |
| | | | 1.8 | (Domain IV) | | | | |
| | | | blastx.14 | envelope protein [Homo | gi\|1196425\|gb\|AAA8 | 70% | 436 | 335 |
| | | | | sapiens] | 8027.1\| | 40% | 554 | 405 |
| HAJAB73 | 1220029 | 167 | blastx.14 | heparan sulfate | pir\|S18252\|S18252 | 46% | 332 | 655 |
| | | | | proteoglycan - mouse | | 40% | 329 | 580 |
| | | | | | | 61% | 275 | 313 |
| | | | | | | 39% | 1318 | 1386 |
| | | | | | | 42% | 272 | 313 |
| | | | | | | 28% | 1297 | 1359 |
| HAJAB73 | 947967 | 272 | HMMER | PFAM: Laminin G | PF00054 | 93.78 | 271 | 636 |
| | | | 1.8 | domain | | | | |
| | | | blastx.14 | perlecan [Mus musculus] | gi\|200296\|gb\|AAA39 | 45% | 331 | 618 |
| | | | | | 911.1\| | 39% | 328 | 579 |
| | | | | | | 61% | 274 | 312 |
| | | | | | | 42% | 271 | 312 |
| | | | | | | 46% | 225 | 263 |
| | | | | | | 60% | 106 | 135 |
| HDTBD67 | 1164345 | 168 | blastx.14 | (AF039833) neurexin IV | gi\|2773268\|gb\|AAB9 | 36% | 405 | 1394 |
| | | | | [Mus musculus] | 6760.1\| | 32% | 1635 | 1943 |
| | | | | | | 58% | 1580 | 1630 |
| | | | | | | 28% | 1323 | 1436 |
| | | | | | | 24% | 1422 | 1571 |
| | | | | | | 53% | 963 | 1001 |
| HDTBD67 | 899636 | 273 | HMMER | PFAM: Laminin G | PF00054 | 53.09 | 615 | 1004 |
| | | | 1.8 | domain | | | | |
| HDTBD67 | 902517 | 274 | HMMER | PFAM: Laminin G | PF00054 | 53.23 | 278 | 667 |
| | | | 1.8 | domain | | | | |
| HOHCS04 | 947254 | 275 | HMMER | PFAM: Laminin G | PF00054 | 57.83 | 289 | 477 |
| | | | 1.8 | domain | | | | |
| | | | blastx.14 | neurexin Il-alpha-b | gi\|205715\|gb\|AAA41 | 88% | 4 | 507 |
| | | | | [Rattus norvegicus] | 706.1\| | 40% | 447 | 491 |
| HEBEI10 | 956734 | 170 | HMMER | PFAM: Extracellular link | PF00193 | 157.5 | 163 | 306 |
| | | | 2.1.1 | domain | | | | |
| | | | blastx.14 | BREVICAN CORE | sp\|P41725\|PGCB_FE | 90% | 37 | 306 |
| | | | | PROTEIN PRECURSOR | LCA | 52% | 300 | 419 |
| | | | | (BRAIN ENRICHED 1 | | 50% | 211 | 306 |
| | | | | | | 83% | 8 | 43 |
| | | | | | | 52% | 364 | 420 |
| HSHCM81 | 911410 | 171 | HMMER | PFAM: ZU5 domain | PF00791 | 198.1 | 144 | 455 |
| | | | 2.1.1 | | | | | |
| | | | blastx.14 | transmembrane receptor | gi\|2055394\|gb\|AAB5 | 89% | 99 | 551 |
| | | | | UNC5H2 [Rattus | 7679.1\| | 88% | 551 | 952 |
| | | | | norvegicus] | | 89% | 47 | 103 |
| | | | | | | 75% | 948 | 1007 |

[0062] Table 2 further characterizes certain encoded polypeptides of the invention, by providing the results of comparisons to protein and protein family databases. The first column provides a unique clone identifier, “Clone ID NO:”, corresponding to a cDNA clone disclosed in Table 1A. The second column provides the unique contig identifier, “Contig ID:” which allows correlation with the information in Table 1A. The third column provides the sequence identifier, “SEQ ID NO:”, for the contig polynucleotide sequences. The fourth column provides the analysis method by which the homology/identity disclosed in the Table was determined. The fifth column provides a description of the PFAM/NR hit identified by each analysis. Column six provides the accession number of the PFAM/NR hit disclosed in the fifth column. Column seven, score/percent identity, provides a quality score or the percent identity, of the hit disclosed in column five. Comparisons were made between polypeptides encoded by polynucleotides of the invention and a non-redundant protein database (herein referred to as “NR”), or a database of protein families (herein referred to as “PFAM”), as described below.

[0063] The NR database, which comprises the NBRF PIR database, the NCBI GenPept database, and the SIB SwissProt and TrEMBL databases, was made non-redundant using the computer program nrdb2 (Warren Gish, Washington University in Saint Louis). Each of the polynucleotides shown in Table 1A, column 3 (e.g., SEQ ID NO:X or the ‘Query’ sequence) was used to search against the NR database. The computer program BLASTX was used to compare a 6-frame translation of the Query sequence to the NR database (for information about the BLASTX algorithm please see Altshul et al., J. Mol. Biol. 215:403-410 (1990); and Gish and States, Nat. Genet. 3:266-272 (1993). A description of the sequence that is most similar to the Query sequence (the highest scoring ‘Subject’) is shown in column five of Table 2 and the database accession number for that sequence is provided in column six. The highest scoring ‘Subject’ is reported in Table 2 if (a) the estimated probability that the match occurred by chance alone is less than 1.0e-07, and (b) the match was not to a known repetitive element. BLASTX returns alignments of short polypeptide segments of the Query and Subject sequences which share a high degree of similarity; these segments are known as High-Scoring Segment Pairs or HSPs. Table 2 reports the degree of similarity between the Query and the Subject for each HSP as a percent identity in Column 7. The percent identity is determined by dividing the number of exact matches between the two aligned sequences in the HSP, dividing by the number of Query amino acids in the HSP and multiplying by 100. The polynucleotides of SEQ ID NO:X which encode the polypeptide sequence that generates an HSP are delineated by columns 8 and 9 of Table 2.

[0064] The PFAM database, PFAM version 2.1, (Sonnhammer et al., Nucl. Acids Res., 26:320-322, 1998)) consists of a series of multiple sequence alignments; one alignment for each protein family. Each multiple sequence alignment is converted into a probability model called a Hidden Markov Model, or HMM, that represents the position-specific variation among the sequences that make up the multiple sequence alignment (see, e.g., Durbin et al., Biological sequence analysis: probabilistic models of proteins and nucleic acids, Cambridge University Press, 1998 for the theory of HMMs). The program HMMER version 1.8 (Sean Eddy, Washington University in Saint Louis) was used to compare the predicted protein sequence for each Query sequence (SEQ ID NO:Y in Table 1A) to each of the HMMs derived from PFAM version 2.1. A HMM derived from PFAM version 2.1 was said to be a significant match to a polypeptide of the invention if the score returned by HMMER 1.8 was greater than 0.8 times the HMMER 1.8 score obtained with the most distantly related known member of that protein family. The description of the PFAM family which shares a significant match with a polypeptide of the invention is listed in column 5 of Table 2, and the database accession number of the PFAM hit is provided in column 6. Column 7 provides the score returned by HMMER version 1.8 for the alignment. Columns 8 and 9 delineate the polynucleotides of SEQ ID NO:X which encode the polypeptide sequence which show a significant match to a PFAM protein family.

[0065] As mentioned, columns 8 and 9 in Table 2, “NT From” and “NT To”, delineate the polynucleotides of “SEQ ID NO:X” that encode a polypeptide having a significant match to the PFAM/NR database as disclosed in the fifth column. In one embodiment, the invention provides a protein comprising, or alternatively consisting of, a polypeptide encoded by the polynucleotides of SEQ ID NO:X delineated in columns 8 and 9 of Table 2. Also provided are polynucleotides encoding such proteins, and the complementary strand thereto.

[0066] The nucleotide sequence SEQ ID NO:X and the translated SEQ ID NO:Y are sufficiently accurate and otherwise suitable for a variety of uses well known in the art and described further below. For instance, the nucleotide sequences of SEQ ID NO:X are useful for designing nucleic acid hybridization probes that will detect nucleic acid sequences contained in SEQ ID NO:X or the cDNA contained in Clone ID NO:Z. These probes will also hybridize to nucleic acid molecules in biological samples, thereby enabling immediate applications in chromosome mapping, linkage analysis, tissue identification and/or typing, and a variety of forensic and diagnostic methods of the invention. Similarly, polypeptides identified from SEQ ID NO:Y may be used to generate antibodies which bind specifically to these polypeptides, or fragments thereof, and/or to the polypeptides encoded by the cDNA clones identified in, for example, Table 1A.

[0067] Nevertheless, DNA sequences generated by sequencing reactions can contain sequencing errors. The errors exist as misidentified nucleotides, or as insertions or deletions of nucleotides in the generated DNA sequence. The erroneously inserted or deleted nucleotides cause frame shifts in the reading frames of the predicted amino acid sequence. In these cases, the predicted amino acid sequence diverges from the actual amino acid sequence, even though the generated DNA sequence may be greater than 99.9% identical to the actual DNA sequence (for example, one base insertion or deletion in an open reading frame of over 1000 bases).

[0068] Accordingly, for those applications requiring precision in the nucleotide sequence or the amino acid sequence, the present invention provides not only the generated nucleotide sequence identified as SEQ ID NO:X, and a predicted translated amino acid sequence identified as SEQ ID NO:Y, but also a sample of plasmid DNA containing cDNA Clone ID NO:Z (deposited with the ATCC on Oct. 5, 2000, and receiving ATCC designation numbers PTA 2574 and PTA 2575; deposited with the ATCC on Jan. 5, 2001, and having depositor reference numbers TS-1, TS-2, AC-1, and AC-2; and/or as set forth, for example, in Table 1A, 6 and 7). The nucleotide sequence of each deposited clone can readily be determined by sequencing the deposited clone in accordance with known methods. Further, techniques known in the art can be used to verify the nucleotide sequences of SEQ ID NO:X.

[0069] The predicted amino acid sequence can then be verified from such deposits. Moreover, the amino acid sequence of the protein encoded by a particular clone can also be directly determined by peptide sequencing or by expressing the protein in a suitable host cell containing the deposited human cDNA, collecting the protein, and determining its sequence.

[0070] RACE Protocol for Recovery of Full-length Genes

[0071] Partial cDNA clones can be made full-length by utilizing the rapid amplification of cDNA ends (RACE) procedure described in Frohman, M. A., et al., Proc. Nat'l. Acad. Sci. USA, 85:8998-9002 (1988). A cDNA clone missing either the 5′ or 3′ end can be reconstructed to include the absent base pairs extending to the translational start or stop codon, respectively. In some cases, cDNAs are missing the start codon of translation, therefor. The following briefly describes a modification of this original 5′ RACE procedure. Poly A+or total RNA is reverse transcribed with Superscript II (Gibco/BRL) and an antisense or complementary primer specific to the cDNA sequence. The primer is removed from the reaction with a Microcon Concentrator (Amicon). The first-strand cDNA is then tailed with dATP and terminal deoxynucleotide transferase (Gibco/BRL). Thus, an anchor sequence is produced which is needed for PCR amplification. The second strand is synthesized from the dA-tail in PCR buffer, Taq DNA polymerase (Perkin-Elmer Cetus), an oligo-dT primer containing three adjacent restriction sites (XhoI, SalI and Clal) at the 5′ end and a primer containing just these restriction sites. This double-stranded cDNA is PCR amplified for 40 cycles with the same primers as well as a nested cDNA-specific antisense primer. The PCR products are size-separated on an ethidium bromide-agarose gel and the region of gel containing cDNA products the predicted size of missing protein-coding DNA is removed. cDNA is purified from the agarose with the Magic PCR Prep kit (Promega), restriction digested with XhoI or SalI, and ligated to a plasmid such as pBluescript SKII (Stratagene) at XhoI and EcoRV sites. This DNA is transformed into bacteria and the plasmid clones sequenced to identify the correct protein-coding inserts. Correct 5′ ends are confirmed by comparing this sequence with the putatively identified homologue and overlap with the partial cDNA clone. Similar methods known in the art and/or commercial kits are used to amplify and recover 3′ ends.

[0072] Several quality-controlled kits are commercially available for purchase. Similar reagents and methods to those above are supplied in kit form from Gibco/BRL for both 5′ and 3′ RACE for recovery of full length genes. A second kit is available from Clontech which is a modification of a related technique, SLIC (single-stranded ligation to single-stranded cDNA), developed by Dumas et al., Nucleic Acids Res., 19:5227-32 (1991). The major differences in procedure are that the RNA is alkaline hydrolyzed after reverse transcription and RNA ligase is used to join a restriction site-containing anchor primer to the first-strand cDNA. This obviates the necessity for the dA-tailing reaction which results in a polyT stretch that is difficult to sequence past.

[0073] An alternative to generating 5′ or 3′ cDNA from RNA is to use cDNA library double-stranded DNA. An asymmetric PCR-amplified antisense cDNA strand is synthesized with an antisense cDNA-specific primer and a plasmid-anchored primer. These primers are removed and a symmetric PCR reaction is performed with a nested cDNA-specific antisense primer and the plasmid-anchored primer.

[0074] RNA Ligase Protocol for Generating the 5′ or 3′ End Sequences to Obtain Full Length Genes

[0075] Once a gene of interest is identified, several methods are available for the identification of the 5′ or 3′ portions of the gene which may not be present in the original cDNA plasmid. These methods include, but are not limited to, filter probing, clone enrichment using specific probes and protocols similar and identical to 5′ and 3′ RACE. While the full length gene may be present in the library and can be identified by probing, a useful method for generating the 5′ or 3′ end is to use the existing sequence information from the original cDNA to generate the missing information. A method similar to 5′ RACE is available for generating the missing 5′ end of a desired full-length gene. (This method was published by Fromont-Racine et al., Nucleic Acids Res., 21(7):1683-1684 (1993)). Briefly, a specific RNA oligonucleotide is ligated to the 5′ ends of a population of RNA presumably containing full-length gene RNA transcript and a primer set containing a primer specific to the ligated RNA oligonucleotide and a primer specific to a known sequence of the gene of interest, is used to PCR amplify the 5′ portion of the desired full length gene which may then be sequenced and used to generate the full length gene. This method starts with total RNA isolated from the desired source, poly A RNA may be used but is not a prerequisite for this procedure. The RNA preparation may then be treated with phosphatase if necessary to eliminate 5′ phosphate groups on degraded or damaged RNA which may interfere with the later RNA ligase step. The phosphatase if used is then inactivated and the RNA is treated with tobacco acid pyrophosphatase in order to remove the cap structure present at the 5′ ends of messenger RNAs. This reaction leaves a 5′ phosphate group at the 5′ end of the cap cleaved RNA which can then be ligated to an RNA oligonucleotide using T4 RNA ligase. This modified RNA preparation can then be used as a template for first strand cDNA synthesis using a gene specific oligonucleotide. The first strand synthesis reaction can then be used as a template for PCR amplification of the desired 5′ end using a primer specific to the ligated RNA oligonucleotide and a primer specific to the known sequence of the gene of interest. The resultant product is then sequenced and analyzed to confirm that the 5′ end sequence belongs to the relevant gene.

[0076] The present invention also relates to vectors or plasmids which include such DNA sequences, as well as the use of the DNA sequences. The material deposited with the ATCC (deposited with the ATCC on Oct. 5, 2000, and receiving ATCC designation numbers PTA 2574 and PTA 2575; deposited with the ATCC on January 5, 2001, and receiving ATCC designation numbers TS-1, TS-2, AC-1, and AC-2; and/or as set forth, for example, in Table 1A, Table 6, or Table 7) is a mixture of cDNA clones derived from a variety of human tissue and cloned in either a plasmid vector or a phage vector, as described, for example, in Table 7. These deposits are referred to as “the deposits” herein. The tissues from which some of the clones were derived are listed in Table 7, and the vector in which the corresponding cDNA is contained is also indicated in Table 7. The deposited material includes cDNA clones corresponding to SEQ ID NO:X described, for example, in Table 1A (Clone ID NO:Z). A clone which is isolatable from the ATCC Deposits by use of a sequence listed as SEQ ID NO:X, may include the entire coding region of a human gene or in other cases such clone may include a substantial portion of the coding region of a human gene. Furthermore, although the sequence listing may in some instances list only a portion of the DNA sequence in a clone included in the ATCC Deposits, it is well within the ability of one skilled in the art to sequence the DNA included in a clone contained in the ATCC Deposits by use of a sequence (or portion thereof) described in, for example Tables lAor 2 by procedures hereinafter further described, and others apparent to those skilled in the art.

[0077] Also provided in Table 7 is the name of the vector which contains the cDNA clone. Each vector is routinely used in the art. The following additional information is provided for convenience.

[0078] Vectors Lambda Zap (U.S. Pat. Nos. 5,128,256 and 5,286,636), Uni-Zap XR (U.S. Pat. Nos. 5,128, 256 and 5,286,636), Zap Express (U.S. Pat. Nos. 5,128,256 and 5,286,636), pBluescript (pBS) (Short, J. M. et al., Nucleic Acids Res. 16:7583-7600 (1988); Alting-Mees, M. A. and Short, J. M., Nucleic Acids Res. 17:9494 (1989)) and pBK (Alting-Mees, M. A. et al., Strategies 5:58-61 (1992)) are commercially available from Stratagene Cloning Systems, Inc., 11011 N. Torrey Pines Road, La Jolla, Calif., 92037. pBS contains an ampicillin resistance gene and pBK contains a neomycin resistance gene. Phagemid pBS may be excised from the Lambda Zap and Uni-Zap XR vectors, and phagemid pBK may be excised from the Zap Express vector. Both phagemids may be transformed into E. coli strain XL-1 Blue, also available from Stratagene.

[0079] Vectors pSportl, pCMVSport 1.0, pCMVSport 2.0 and pCMVSport 3.0, were obtained from Life Technologies, Inc., P. O. Box 6009, Gaithersburg, Md. 20897. All Sport vectors contain an ampicillin resistance gene and may be transformed into E. coli strain DH10B, also available from Life Technologies. See, for instance, Gruber, C. E., et al., Focus 15:59- (1993). Vector lafmid BA (Bento Soares, Columbia University, New York, N.Y.) contains an ampicillin resistance gene and can be transformed into E. coli strain XL-1 Blue. Vector pCR® 2.1, which is available from Invitrogen, 1600 Faraday Avenue, Carlsbad, Calif. 92008, contains an ampicillin resistance gene and may be transformed into E. coli strain DH10B, available from Life Technologies. See, for instance, Clark, J. M., Nuc. Acids Res. 16:9677-9686 (1988) and Mead, D. et al., Bio/Technology 9: (1991).

[0080] The present invention also relates to the genes corresponding to SEQ ID NO:X, SEQ ID NO:Y, and/or the deposited clone (Clone ID NO:Z). The corresponding gene can be isolated in accordance with known methods using the sequence information disclosed herein. Such methods include preparing probes or primers from the disclosed sequence and identifying or amplifying the corresponding gene from appropriate sources of genomic material.

[0081] Also provided in the present invention are allelic variants, orthologs, and/or species homologs. Procedures known in the art can be used to obtain full-length genes, allelic variants, splice variants, full-length coding portions, orthologs, and/or species homologs of genes corresponding to SEQ ID NO:X or the complement thereof, polypeptides encoded by genes corresponding to SEQ ID NO:X or the complement thereof, and/or the cDNA contained in Clone ID NO:Z, using information from the sequences disclosed herein or the clones deposited with the ATCC. For example, allelic variants and/or species homologs may be isolated and identified by making suitable probes or primers from the sequences provided herein and screening a suitable nucleic acid source for allelic variants and/or the desired homologue.

[0082] The polypeptides of the invention can be prepared in any suitable manner. Such polypeptides include isolated naturally occurring polypeptides, recombinantly produced polypeptides, synthetically produced polypeptides, or polypeptides produced by a combination of these methods. Means for preparing such polypeptides are well understood in the art.

[0083] The polypeptides may be in the form of the secreted protein, including the mature form, or may be a part of a larger protein, such as a fusion protein (see below). It is often advantageous to include an additional amino acid sequence which contains secretory or leader sequences, pro-sequences, sequences which aid in purification, such as multiple histidine residues, or an additional sequence for stability during recombinant production.

[0084] The polypeptides of the present invention are preferably provided in an isolated form, and preferably are substantially purified. A recombinantly produced version of a polypeptide, including the secreted polypeptide, can be substantially purified using techniques described herein or otherwise known in the art, such as, for example, by the one-step method described in Smith and Johnson, Gene 67:31-40 (1988). Polypeptides of the invention also can be purified from natural, synthetic or recombinant sources using techniques described herein or otherwise known in the art, such as, for example, antibodies of the invention raised against the polypeptides of the present invention in methods which are well known in the art.

[0085] The present invention provides a polynucleotide comprising, or alternatively consisting of, the nucleic acid sequence of SEQ ID NO:X, and/or the cDNA sequence contained in Clone ID NO:Z. The present invention also provides a polypeptide comprising, or alternatively, consisting of, the polypeptide sequence of SEQ ID NO:Y, a polypeptide encoded by SEQ ID NO:X or a complement thereof, a polypeptide encoded by the cDNA contained in Clone ID NO:Z, and/or the polypeptide sequence encoded by a nucleotide sequence in SEQ ID NO:B as defined in column 6 of Table 1B. Polynucleotides encoding a polypeptide comprising, or alternatively consisting of the polypeptide sequence of SEQ ID NO:Y, a polypeptide encoded by SEQ ID NO:X, a polypeptide encoded by the cDNA contained in Clone ID NO:Z, and/or a polypeptide sequence encoded by a nucleotide sequence in SEQ ID NO:B as defined in column 6 of Table 1B are also encompassed by the invention. The present invention further encompasses a polynucleotide comprising, or alternatively consisting of, the complement of the nucleic acid sequence of SEQ ID NO:X, a nucleic acid sequence encoding a polypeptide encoded by the complement of the nucleic acid sequence of SEQ ID NO:X, and/or the cDNA contained in Clone ID NO:Z.

[0086] Moreover, representative examples of polynucleotides of the invention comprise, or alternatively consist of, one, two, three, four, five, six, seven, eight, nine, ten, or more of the sequences delineated in Table 1B column 6, or any combination thereof. Additional, representative examples of polynucleotides of the invention comprise, or alternatively consist of, one, two, three, four, five, six, seven, eight, nine, ten, or more of the complementary strand(s) of the sequences delineated in Table 1B column 6, or any combination thereof. In further embodiments, the above-described polynucleotides of the invention comprise, or alternatively consist of, sequences delineated in Table 1B, column 6, and have a nucleic acid sequence which is different from that of the BAC fragment having the sequence disclosed in SEQ ID NO:B (see Table 1B, column 5). In additional embodiments, the above-described polynucleotides of the invention comprise, or alternatively consist of, sequences delineated in Table 1B, column 6, and have a nucleic acid sequence which is different from that published for the BAC clone identified as BAC ID NO:A (see Table 1B, column 4). In additional embodiments, the above-described polynucleotides of the invention comprise, or alternatively consist of, sequences delineated in Table 1B, column 6, and have a nucleic acid sequence which is different from that contained in the BAC clone identified as BAC ID NO:A (see Table 1B, column 4). Polypeptides encoded by these polynucleotides, other polynucleotides that encode these polypeptides, and antibodies that bind these polypeptides are also encompassed by the invention. Additionally, fragments and variants of the above-described polynucleotides and polypeptides are also encompassed by the invention.

[0087] Further, representative examples of polynucleotides of the invention comprise, or alternatively consist of, one, two, three, four, five, six, seven, eight, nine, ten, or more of the sequences delineated in column 6 of Table 1B which correspond to the same Clone ID NO:Z (see Table 1B, column 1), or any combination thereof. Additional, representative examples of polynucleotides of the invention comprise, or alternatively consist of, one, two, three, four, five, six, seven, eight, nine, ten, or more of the complementary strand(s) of the sequences delineated in column 6 of Table 1B which correspond to the same Clone ID NO:Z (see Table 1B, column 1), or any combination thereof. In further embodiments, the above-described polynucleotides of the invention comprise, or alternatively consist of, sequences delineated in column 6 of Table 1B which correspond to the same Clone ID NO:Z (see Table 1B, column 1) and have a nucleic acid sequence which is different from that of the BAC fragment having the sequence disclosed in SEQ ID NO:B (see Table 1B, column 5). In additional embodiments, the above-described polynucleotides of the invention comprise, or alternatively consist of, sequences delineated in column 6 of Table 1B which correspond to the same Clone ID NO:Z (see Table 1B, column 1) and have a nucleic acid sequence which is different from that published for the BAC clone identified as BAC ID NO:A (see Table 1B, column 4). In additional embodiments, the above-described polynucleotides of the invention comprise, or alternatively consist of, sequences delineated in column 6 of Table 1B which correspond to the same Clone ID NO:Z (see Table 1B, column 1) and have a nucleic acid sequence which is different from that contained in the BAC clone identified as BAC ID NO:A (see Table 1B, column 4). Polypeptides encoded by these polynucleotides, other polynucleotides that encode these polypeptides, and antibodies that bind these polypeptides are also encompassed by the invention. Additionally, fragments and variants of the above-described polynucleotides and polypeptides are also encompassed by the invention.

[0088] Further, representative examples of polynucleotides of the invention comprise, or alternatively consist of, one, two, three, four, five, six, seven, eight, nine, ten, or more of the sequences delineated in column 6 of Table 1B which correspond to the same contig sequence identifer SEQ ID NO:X (see Table 1B, column 2), or any combination thereof. Additional, representative examples of polynucleotides of the invention comprise, or alternatively consist of, one, two, three, four, five, six, seven, eight, nine, ten, or more of the complementary strand(s) of the sequences delineated in column 6 of Table 1B which correspond to the same contig sequence identifer SEQ ID NO:X (see Table 1B, column 2), or any combination thereof. In further embodiments, the above-described polynucleotides of the invention comprise, or alternatively consist of, sequences delineated in column 6 of Table 1B which correspond to the same contig sequence identifer SEQ ID NO:X (see Table 1B, column 2) and have a nucleic acid sequence which is different from that of the BAC fragment having the sequence disclosed in SEQ ID NO:B (see Table 1B, column 5). In additional embodiments, the above-described polynucleotides of the invention comprise, or alternatively consist of, sequences delineated in column 6 of Table 1B which correspond to the same contig sequence identifer SEQ ID NO:X (see Table 1B, column 2) and have a nucleic acid sequence which is different from that published for the BAC clone identified as BAC ID NO:A (see Table 1B, column 4). In additional embodiments, the above-described polynucleotides of the invention comprise, or alternatively consist of, sequences delineated in column 6 of Table 1B which correspond to the same contig sequence identifer SEQ ID NO:X (see Table 1B, column 2) and have a nucleic acid sequence which is different from that contained in the BAC clone identified as BAC ID NO:A (See Table 1B, column 4). Polypeptides encoded by these polynucleotides, other polynucleotides that encode these polypeptides, and antibodies that bind these polypeptides are also encompassed by the invention. Additionally, fragments and variants of the above-described polynucleotides and polypeptides are also encompassed by the invention.

[0089] Moreover, representative examples of polynucleotides of the invention comprise, or alternatively consist of, one, two, three, four, five, six, seven, eight, nine, ten, or more of the sequences delineated in the same row of Table 1B column 6, or any combination thereof. Additional, representative examples of polynucleotides of the invention comprise, or alternatively consist of, one, two, three, four, five, six, seven, eight, nine, ten, or more of the complementary strand(s) of the sequences delineated in the same row of Table 1B column 6, or any combination thereof. In preferred embodiments, the polynucleotides of the invention comprise, or alternatively consist of, one, two, three, four, five, six, seven, eight, nine, ten, or more of the complementary strand(s) of the sequences delineated in the same row of Table 1B column 6, wherein sequentially delineated sequences in the table (i.e. corresponding to those exons located closest to each other) are directly contiguous in a 5′ to 3′ orientation. In further embodiments, above-described polynucleotides of the invention comprise, or alternatively consist of, sequences delineated in the same row of Table 1B, column 6, and have a nucleic acid sequence which is different from that of the BAC fragment having the sequence disclosed in SEQ ID NO:B (see Table 1B, column 5). In additional embodiments, the above-described polynucleotides of the invention comprise, or alternatively consist of, sequences delineated in the same row of Table 1B, column 6, and have a nucleic acid sequence which is different from that published for the BAC clone identified as BAC ID NO:A (see Table 1B, column 4). In additional embodiments, the above-described polynucleotides of the invention comprise, or alternatively consist of, sequences delineated in the same row of Table 1B, column 6, and have a nucleic acid sequence which is different from that contained in the BAC clone identified as BAC ID NO:A (see Table 1B, column 4). Polypeptides encoded by these polynucleotides, other polynucleotides that encode these polypeptides, and antibodies that bind these polypeptides are also encompassed by the invention.

[0090] In additional specific embodiments, polynucleotides of the invention comprise, or alternatively consist of, one, two, three, four, five, six, seven, eight, nine, ten, or more of the sequences delineated in column 6 of Table 1B, and the polynucleotide sequence of SEQ ID NO:X (e.g., as defined in Table 1B, column 2) or fragments or variants thereof. Polypeptides encoded by these polynucleotides, other polynucleotides that encode these polypeptides, and antibodies that bind these polypeptides are also encompassed by the invention.

[0091] In additional specific embodiments, polynucleotides of the invention comprise, or alternatively consist of, one, two, three, four, five, six, seven, eight, nine, ten, or more of the sequences delineated in column 6 of Table 1B which correspond to the same Clone ID NO:Z (see Table 1B, column 1), and the polynucleotide sequence of SEQ ID NO:X (e.g., as defined in Table 1A or 1B) or fragments or variants thereof. In preferred embodiments, the delineated sequence(s) and polynucleotide sequence of SEQ ID NO:X correspond to the same Clone ID NO:Z. Polypeptides encoded by these polynucleotides, other polynucleotides that encode these polypeptides, and antibodies that bind these polypeptides are also encompassed by the invention.

[0092] In further specific embodiments, polynucleotides of the invention comprise, or alternatively consist of, one, two, three, four, five, six, seven, eight, nine, ten, or more of the sequences delineated in the same row of column 6 of Table 1B, and the polynucleotide sequence of SEQ ID NO:X (e.g., as defined in Table 1A or 1B) or fragments or variants thereof. In preferred embodiments, the delineated sequence(s) and polynucleotide sequence of SEQ ID NO:X correspond to the same row of column 6 of Table 1B. Polypeptides encoded by these polynucleotides, other polynucleotides that encode these polypeptides, and antibodies that bind these polypeptides are also encompassed by the invention.

[0093] In additional specific embodiments, polynucleotides of the invention comprise, or alternatively consist of a polynucleotide sequence in which the 3′ 10 polynucleotides of one of the sequences delineated in column 6 of Table 1B and the 5′ 10 polynucleotides of the sequence of SEQ ID NO:X are directly contiguous. Nucleic acids which hybridize to the complement of these 20 contiguous polynucleotides under stringent hybridization conditions or alternatively, under lower stringency conditions, are also encompassed by the invention. Polypeptides encoded by these polynucleotides and/or nucleic acids, other polynucleotides and/or nucleic acids that encode these polypeptides, and antibodies that bind these polypeptides are also encompassed by the invention. Additionally, fragments and variants of the above-described polynucleotides, nucleic acids, and polypeptides are also encompassed by the invention.

[0094] In additional specific embodiments, polynucleotides of the invention comprise, or alternatively consist of, a polynucleotide sequence in which the 3′ 10 polynucleotides of one of the sequences delineated in column 6 of Table 1B and the 5′ 10 polynucleotides of a fragment or variant of the sequence of SEQ ID NO:X are directly contiguous Nucleic acids which hybridize to the complement of these 20 contiguous polynucleotides under stringent hybridization conditions or alternatively, under lower stringency conditions, are also encompassed by the invention. Polypeptides encoded by these polynucleotides and/or nucleic acids, other polynucleotides and/or nucleic acids encoding these polypeptides, and antibodies that bind these polypeptides are also encompassed by the invention. Additionally, fragments and variants of the above-described polynucleotides, nucleic acids, and polypeptides are also encompassed by the invention.

[0095] In specific embodiments, polynucleotides of the invention comprise, or alternatively consist of, a polynucleotide sequence in which the 3′ 10 polynucleotides of the sequence of SEQ ID NO:X and the 5′ 10 polynucleotides of the sequence of one of the sequences delineated in column 6 of Table 1B are directly contiguous. Nucleic acids which hybridize to the complement of these 20 contiguous polynucleotides under stringent hybridization conditions or alternatively, under lower stringency conditions, are also encompassed by the invention. Polypeptides encoded by these polynucleotides and/or nucleic acids, other polynucleotides and/or nucleic acids encoding these polypeptides, and antibodies that bind these polypeptides are also encompassed by the invention. Additionally, fragments and variants of the above-described polynucleotides, nucleic acids, and polypeptides are also encompassed by the invention.

[0096] In specific embodiments, polynucleotides of the invention comprise, or alternatively consist of, a polynucleotide sequence in which the 3′ 10 polynucleotides of a fragment or variant of the sequence of SEQ ID NO:X and the 5′ 10 polynucleotides of the sequence of one of the sequences delineated in column 6 of Table 1B are directly contiguous. Nucleic acids which hybridize to the complement of these 20 contiguous polynucleotides under stringent hybridization conditions or alternatively, under lower stringency conditions, are also encompassed by the invention. Polypeptides encoded by these polynucleotides and/or nucleic acids, other polynucleotides and/or nucleic acids encoding these polypeptides, and antibodies that bind these polypeptides are also encompassed by the invention. Additionally, fragments and variants of the above-described polynucleotides, nucleic acids, and polypeptides, are also encompassed by the invention.

[0097] In further specific embodiments, polynucleotides of the invention comprise, or alternatively consist of, a polynucleotide sequence in which the 3′ 10 polynucleotides of one of the sequences delineated in column 6 of Table 1B and the 5′ 10 polynucleotides of another sequence in column 6 are directly contiguous. Nucleic acids which hybridize to the complement of these 20 contiguous polynucleotides under stringent hybridization conditions or alternatively, under lower stringency conditions, are also encompassed by the invention. Polypeptides encoded by these polynucleotides and/or nucleic acids, other polynucleotides and/or nucleic acids encoding these polypeptides, and antibodies that bind these polypeptides are also encompassed by the invention. Additionally, fragments and variants of the above-described polynucleotides, nucleic acids, and polypeptides are also encompassed by the invention.

[0098] In specific embodiments, polynucleotides of the invention comprise, or alternatively consist of, a polynucleotide sequence in which the 3′ 10 polynucleotides of one of the sequences delineated in column 6 of Table 1B and the 5′ 10 polynucleotides of another sequence in column 6 corresponding to the same Clone ID NO:Z (see Table 1B, column 1) are directly contiguous. Nucleic acids which hybridize to the complement of these 20 lower stringency conditions, are also encompassed by the invention. Polypeptides encoded by these polynucleotides and/or nucleic acids, other polynucleotides and/or nucleic acids encoding these polypeptides, and antibodies that bind these polypeptides are also encompassed by the invention. Additionally, fragments and variants of the above-described polynucleotides, nucleic acids, and polypeptides are also encompassed by the invention.

[0099] In specific embodiments, polynucleotides of the invention comprise, or alternatively consist of, a polynucleotide sequence in which the 3′ 10 polynucleotides of one sequence in column 6 corresponding to the same contig sequence identifer SEQ ID NO:X (see Table 1B, column 2) are directly contiguous. Nucleic acids which hybridize to the complement of these 20 contiguous polynucleotides under stringent hybridization conditions or alternatively, under lower stringency conditions, are also encompassed by the invention. Polypeptides encoded by these polynucleotides and/or nucleic acids, other polynucleotides and/or nucleic acids encoding these polypeptides, and antibodies that bind these polypeptides are also encompassed by the invention. Additionally, fragments and variants of the above-described polynucleotides, nucleic acids, and polypeptides are also encompassed by the invention.

[0100] In specific embodiments, polynucleotides of the invention comprise, or alternatively consist of a polynucleotide sequence in which the 3′ 10 polynucleotides of one of the sequences delineated in column 6 of Table 1B and the 5′ 10 polynucleotides of another sequence in column 6 corresponding to the same row are directly contiguous. In preferred embodiments, the 3′ 10 polynucleotides of one of the sequences delineated in column 6 of Table 1B is directly contiguous with the 5′ 10 polynucleotides of the next sequential exon delineated in Table 1B, column 6. Nucleic acids which hybridize to the complement of these 20 contiguous polynucleotides under stringent hybridization conditions or alternatively, under lower stringency conditions, are also encompassed by the invention. Polypeptides encoded by these polynucleotides and/or nucleic acids, other polynucleotides and/or nucleic acids encoding these polypeptides, and antibodies that bind these polypeptides are also encompassed by the invention. Additionally, fragments and variants of the above-described polynucleotides, nucleic acids, and polypeptides are also encompassed by the invention.

[0101] Many polynucleotide sequences, such as EST sequences, are publicly available and accessible through sequence databases and may have been publicly available prior to conception of the present invention. Preferably, such related polynucleotides are specifically excluded from the scope of the present invention. Accordingly, for each contig sequence (SEQ ID NO:X) listed in the fourth column of Table 1A, preferably excluded are one or more polynucleotides comprising a nucleotide sequence described by the general formula of a−b, where a is any integer between 1 and the final nucleotide minus 15 of SEQ ID NO:X, b is an integer of 15 to the final nucleotide of SEQ ID NO:X, where both a and b correspond to the positions of nucleotide residues shown in SEQ ID NO:X, and where b is greater than or equal to a+14. More specifically, preferably excluded are one or more polynucleotides comprising a nucleotide sequence described by the general formula of a−b, where a and b are integers as defined in columns 4 and 5, respectively, of Table 3. In specific embodiments, the polynucleotides of the invention do not consist of at least one, two, three, four, five, ten, or more of the specific polynucleotide sequences referenced by the Genbank Accession No. as disclosed in column 6 of Table 3 (including for example, published sequence in connection with a particular BAC clone). In further embodiments, preferably excluded from the invention are the specific polynucleotide sequencers) contained in the clones corresponding to at least one, two, three, four, five, ten, or more of the available material having the accession numbers identified in the sixth column of this Table (including for example, the actual sequence contained in an identified BAC clone). In no way is this listing meant to encompass all of the sequences which may be excluded by the general formula, it is just a representative example. All references available through these accessions are hereby incorporated by reference in their entirety.

TABLE 3

| Clone ID | SEQ ID | Contig | EST Disclaimer | | |
|---|---|---|---|---|---|
| NO: Z | NO: X | ID: | Range of a | Range of b | Accession #'s |
| HKAIP13 | 11 | 1027773 | 1-2296 | 15-2310 | AL132826, and AL132826. |
| HE2JT53 | 12 | 1027762 | 1-1186 | 15-1200 | AC016771, AC016771, and AC048382. |
| HARMY82 | 13 | 930293 | 1-763 | 15-777 | |
| HDPBG11 | 14 | 1216581 | 1-2085 | 15-2099 | |
| HKAJI55 | 15 | 1132402 | 1-1052 | 15-1066 | |
| HMTBC77 | 16 | 1083572 | 1-729 | 15-743 | |
| HE8UA52 | 17 | 948509 | 1-697 | 15-711 | AA427373. |
| HHBFK81 | 18 | 974909 | 1-783 | 15-797 | AI675601, AI927569, AA121420, N39494, |
| | | | | | AW006374, AI021956, AI826018, |
| | | | | | AA773728, AW169258, AI890341, |
| | | | | | AI810654, AA065130, AA448616, |
| | | | | | AI651209, R02486, AA953246, N47632, |
| | | | | | AA167466, AI199843, AW019935, |
| | | | | | AA043484, W32485, W04784, |
| | | | | | AW393728, AA329606, AA082338, |
| | | | | | AW023165, AW023176, AI972357, |
| | | | | | AA065199, AA297541, AA595425, |
| | | | | | AI088890, AI148316, AW393723, |
| | | | | | AA709124, AI653895, N51991, |
| | | | | | AA034469, AI370980, AI131110, |
| | | | | | AA595022, AI128287, AI139419, |
| | | | | | AI050847, R27136, AI128288, AI089965, |
| | | | | | AI097508, AI131119, AA365217, |
| | | | | | AI073942, AI131359, AI078524, |
| | | | | | AA121267, AA773671, AW021990, |
| | | | | | AW393730, N26805, AI804337, |
| | | | | | AA973858, R25976, AW167929, |
| | | | | | AA931243, N52700, R25966, D79864, |
| | | | | | W02151, AA514757, AW149152, |
| | | | | | W42865, AI215875, N53823, AW204894, |
| | | | | | AA016282, AA071473, AI970871, |
| | | | | | AI041690, AA716632, W05292, |
| | | | | | AA621469, N57486, AA569580, W67469, |
| | | | | | AA971152, AA693418, AI332533, |
| | | | | | AI092127, AA782744, W67470, |
| | | | | | AI217065, AI869057, F08289, AI282280, |
| | | | | | AA693916, AL137638, U69263, and |
| | | | | | U69262. |
| HJACH50 | 19 | 1078153 | 1-714 | 15-728 | |
| HFIJC31 | 20 | 828148 | 1-519 | 15-533 | AA885328, N79858, and AI184184. |
| HNTMB90 | 21 | 910934 | 1-718 | 15-732 | Z99396, AL038837, AL037051, |
| | | | | | AL036725, AA631969, AL039074, |
| | | | | | AW392670, AL036418, AL039085, |
| | | | | | AL039564, AL036858, AL039156, |
| | | | | | AL039108, AL038509, AL039109, |
| | | | | | AL039128, AL036924, AL037094, |
| | | | | | AL039659, AL038531, AL036196, |
| | | | | | AL039625, AL039648, AL045337, |
| | | | | | AL036767, AL119497, AL037082, |
| | | | | | AL037526, AL036190, AL038447, |
| | | | | | AL119483, AL037639, AW372827, |
| | | | | | AL039678, AW363220, AL039629, |
| | | | | | AW384394, AL119457, AL039423, |
| | | | | | AL036238, AL039150, AL119319, |
| | | | | | AL040992, AL119324, AL042909, |
| | | | | | U46350, AL038520, AL119484, |
| | | | | | AL119391, AL037077, AL119443, |
| | | | | | AL119522, U46351, AL119355, |
| | | | | | AL119363, AL037726, U46341, U46347, |
| | | | | | U46349, AL134533, AL039410, |
| | | | | | AL038851, AL119341, AL134531, |
| | | | | | AL119335, AL119418, AL119396, |
| | | | | | AL039386, AL036998, AL036733, |
| | | | | | AL119496, AL037615, AL119439, |
| | | | | | AL036268, AL037085, AL119401, |
| | | | | | AL119444, AL037205, AL037027, |
| | | | | | AL037178, AL045353, U46346, |
| | | | | | AL036679, AL042614, AL036765, |
| | | | | | AL042965, AL042975, AL134528, |
| | | | | | AL134538, AL042984, AL036191, |
| | | | | | AL119399, AL134920, AL042544, |
| | | | | | U46345, AL036719, AL043003, |
| | | | | | AL043019, AL042542, AL042551, |
| | | | | | AL042450, AL043029, AL134542, |
| | | | | | AL134532, AL037021, AL037054, |
| | | | | | AL036836, AL036158, AL119464, |
| | | | | | AL036774, AL036886, AL036999, |
| | | | | | AL036964, AR066494, AR060234, |
| | | | | | AR023813, AR064707, A81671, |
| | | | | | AR069079, AB026436, AR054110, and |
| | | | | | AR064706. |
| HSDHB12 | 22 | 941973 | 1-624 | 15-638 | AA447298. |
| HARMO91 | 23 | 1161173 | 1-3216 | 15-3230 | |
| HFPFB75 | 24 | 1152334 | 1-3013 | 15-3027 | |
| HFPGX08 | 25 | 1152339 | 1-1211 | 15-1225 | |
| HFXJD66 | 26 | 1197911 | 1-1971 | 15-1985 | |
| HKABY22 | 27 | 1216582 | 1-2365 | 15-2379 | |
| HLHCQ90 | 28 | 1128610 | 1-1653 | 15-1667 | |
| HMKAJ50 | 29 | 1199288 | 1-1660 | 15-1674 | |
| HNGME19 | 30 | 1152253 | 1-1426 | 15-1440 | |
| HOGEO44 | 31 | 1227219 | 1-4144 | 15-4158 | |
| HWDAE94 | 32 | 947194 | 1-524 | 15-538 | |
| HWHGC57 | 33 | 1085498 | 1-699 | 15-713 | |
| HWHPE63 | 34 | 940445 | 1-714 | 15-728 | |
| HTEPC92 | 35 | 1129089 | 1-1561 | 15-1575 | |
| HACAD35 | 36 | 949199 | 1-1460 | 15-1474 | AI817458, AI810494, AA442536, |
| | | | | | AI271432, AA228126, AA227978, |
| | | | | | AA687616, AW316554, AW351633, |
| | | | | | D62849, AA346825, AW262553, |
| | | | | | AC007363, and AC007363. |
| HBXFI23 | 37 | 945319 | 1-604 | 15-618 | |
| HDPMQ42 | 38 | 1152330 | 1-1082 | 15-1096 | |
| HDPPU44 | 39 | 1151459 | 1-974 | 15-988 | |
| HDPTQ81 | 40 | 1045003 | 1-1454 | 15-1468 | |
| HEQBH92 | 41 | 1128230 | 1-418 | 15-432 | |
| HLTEO24 | 42 | 1194106 | 1-1196 | 15-1210 | |
| HOABR66 | 43 | 1181041 | 1-2152 | 15-2166 | |
| HWADF26 | 44 | 1151531 | 1-843 | 15-857 | |
| HWAGT47 | 45 | 1198738 | 1-1108 | 15-1122 | |
| HHFJH79 | 46 | 933308 | 1-819 | 15-833 | AC006942. |
| HPJEV71 | 47 | 949153 | 1-2225 | 15-2239 | AW239092, AA420817, AA420784, |
| | | | | | AA373314, and AW135187. |
| HRDAF83 | 48 | 997244 | 1-2111 | 15-2125 | |
| HUFCN91 | 49 | 1193585 | 1-2517 | 15-2531 | |
| HILBH66 | 50 | 948844 | 1-675 | 15-689 | AW271361, AI669661, AI066605, |
| | | | | | AA425588, AI735664, AA195146, |
| | | | | | W74608, AW027978, AI018730, |
| | | | | | AI935510, AI185633, AW043919, |
| | | | | | AA993404, AI640585, AI927620, |
| | | | | | AW002498, AI934436, AI559981, |
| | | | | | AI968681, AI672299, AI422678, |
| | | | | | AA569942, AI378894, AI659268, |
| | | | | | AI273512, AI436227, AI363301, |
| | | | | | AA766347, AI380745, AI206984, |
| | | | | | W94646, AA773648, AI094063, |
| | | | | | AA628526, AA989426, AA889351, |
| | | | | | AA883824, AW002369, AI355683, |
| | | | | | AI373924, AI817823, AI763339, |
| | | | | | AI278238, AI767047, AA889352, |
| | | | | | AI127585, AI360752, AA195282, |
| | | | | | AI971450, AI132981, AI962756, |
| | | | | | AA902222, AI767875, W94385, |
| | | | | | AA569949, AI468466, AI240574, |
| | | | | | AI190556, AW013937, AI240575, |
| | | | | | AW104888, W94608, AW268725, |
| | | | | | AI133092, H79051, AI140477, AI366169, |
| | | | | | AA425451, D59520, AA657883, |
| | | | | | AI202549, AI205492, AI916042, |
| | | | | | AI695700, AI184045, AW104299, |
| | | | | | AA503512, AI648700, AI743100, |
| | | | | | AI824883, AI652636, T28917, AI982950, |
| | | | | | AA994143, AA091770, AI383570, |
| | | | | | AA918387, AW298255, N40872, |
| | | | | | AW204184, AI355665, AA748371, |
| | | | | | N30085, L25851, I33984, AF020046, |
| | | | | | U12236, AF020045, AC002993, and |
| | | | | | AC002993. |
| HLWAW86 | 51 | 785395 | 1-522 | 15-536 | AA460460, AA969196, and AA885014. |
| HAHEF22 | 52 | 910996 | 1-872 | 15-886 | AA447298. |
| HBGQN46 | 53 | 945370 | 1-888 | 15-902 | AA479990, AW293680, AI473367, |
| | | | | | AI184880, AI086741, AI081183, |
| | | | | | AI214276, AA742259, AA836754, |
| | | | | | R55060, AA251267, AI285889, AI813391, |
| | | | | | AW297831, AI819671, AF038458, and |
| | | | | | AF038458. |
| HCEOR02 | 54 | 921110 | 1-545 | 15-559 | AA325666. |
| HCYBK19 | 55 | 925494 | 1-2664 | 15-2678 | AI829726, AI809562, AI927757, |
| | | | | | AI927758, AI927768, AW297770, |
| | | | | | AA165336, AI638072, AI149852, |
| | | | | | AW298053, AI365991, AA904547, |
| | | | | | H15885, AA985065, AI359235, |
| | | | | | AW207262, AI470080, AI421572, |
| | | | | | AA305419, AA985170, AW341104, |
| | | | | | AI423550, AI362528, AI453702, |
| | | | | | AI654827, AA927292, H91991, AI365149, |
| | | | | | AI365324, D81295, AI797740, AI357382, |
| | | | | | AI953516, AA909430, H01576, |
| | | | | | AA969956, AA379840, H52748, R37302, |
| | | | | | AA905264, Z43289, R62753, R18887, |
| | | | | | R68272, H04859, AA746048, T31617, |
| | | | | | H04764, T78758, Z44077, T32807, |
| | | | | | D60323, AA634475, H01477, AI193962, |
| | | | | | H00918, D81446, M86147, AA983881, |
| | | | | | AA318875, N64328, AA165369, Z39361, |
| | | | | | D62629, T16370, F03272, H00919, |
| | | | | | N34301, and H46107. |
| HEMCL65 | 56 | 910900 | 1-453 | 15-467 | AI902552, and AI902562. |
| HHFGP83 | 57 | 828162 | 1-325 | 15-339 | AC026329, and AC026348. |
| HMKCH92 | 58 | 910936 | 1-789 | 15-803 | T78768, R13299, R14933, AB003592, |
| | | | | | D87248, AC018833, AC034192, |
| | | | | | AC026206, AC026206, AC022381, and |
| | | | | | AC022381. |
| HMSKF13 | 59 | 708207 | 1-387 | 15-401 | AA148393, AC023891, and AC023891. |
| HMTAV95 | 60 | 614936 | 1-395 | 15-409 | AB023187, AL137000, AL137000, and |
| | | | | | AL137000. |
| HRODF07 | 61 | 952426 | 1-324 | 15-338 | AC011597, and AC023402. |
| HAGAE60 | 62 | 940223 | 1-543 | 15-557 | |
| HCEON04 | 63 | 1154308 | 1-2924 | 15-2938 | |
| HE2PC86 | 64 | 1082523 | 1-494 | 15-508 | |
| HE8BN82 | 65 | 1222273 | 1-2701 | 15-2715 | |
| HFXAT30 | 66 | 1081795 | 1-644 | 15-658 | |
| HGBAE53 | 67 | 1211778 | 1-473 | 15-487 | |
| HMEKQ12 | 68 | 910713 | 1-345 | 15-359 | AC031992, and AC031992. |
| HNDAA52 | 69 | 1074878 | 1-748 | 15-762 | |
| HNHBF47 | 70 | 949027 | 1-911 | 15-925 | AL390252, AL390252, AL157901, |
| | | | | | AL157901, AL356389, and AL356389. |
| HODFW19 | 71 | 947662 | 1-461 | 15-475 | |
| HOHEC71 | 72 | 1217039 | 1-2413 | 15-2427 | |
| HSDKI91 | 73 | 1165365 | 1-1582 | 15-1596 | |
| HUCNE72 | 74 | 1162859 | 1-1435 | 15-1449 | |
| HCEOW20 | 75 | 944273 | 1-1073 | 15-1087 | |
| HDPJZ04 | 76 | 1228281 | 1-2631 | 15-2645 | |
| HCQCI06 | 77 | 915000 | 1-1190 | 15-1204 | AI123952, AI751915, AA343597, |
| | | | | | W79144, AA345718, AA304549, |
| | | | | | AA256582, W81545, D45547, AL117664, |
| | | | | | AC068763, AC068763, and AC069223. |
| HE8UT58 | 78 | 973153 | 1-1090 | 15-1104 | AL079991, AW409774, AA404732, |
| | | | | | AA782257, AI808909, AA099036, |
| | | | | | AA677654, AA405418, AW341107, |
| | | | | | AW409667, AA659407, AA503263, |
| | | | | | AI433410, AI885266, AI341147, |
| | | | | | AA905366, AI692534, AI027623, |
| | | | | | AA468344, AA923181, AA778251, |
| | | | | | AI681129, AA533117, AI986154, |
| | | | | | AA099037, AI955317, AI276678, H29006, |
| | | | | | AA404602, AI347168, AA37 1047, |
| | | | | | AI420387, AW135263, AA868124, |
| | | | | | T12623, H09118, AA430277, AA365338, |
| | | | | | T08839, AA813337, H29109, HI1272, |
| | | | | | AW137535, AB014534, AF116574, |
| | | | | | AF116573, and AC032004. |
| HFXJI27 | 79 | 971046 | 1-427 | 15-441 | AI335925, AI890750, AA187638, N39062, |
| | | | | | AI268071, D79411, N75622, N22381, |
| | | | | | H13284, R43578, F10497, R26373, |
| | | | | | AI625385, AI220697, R21997, AA932204, |
| | | | | | AI493179, AI373111, AA909963, |
| | | | | | AI476063, AA909961, AI888010, |
| | | | | | AI619918, AA976881, AW339040, |
| | | | | | AI432041, AA015789, AI049514, |
| | | | | | AI355877, AI888471, N59174, AI679618, |
| | | | | | AI373318, AA670204, AI358468, |
| | | | | | AI336216, AI266210, AA947133, R33792, |
| | | | | | AW081307, AA610540, AA928678, |
| | | | | | AA922947, AA922946, AI817788, |
| | | | | | AI245931, AA948492, AA044223, |
| | | | | | I63607, AI433872, AW269052, AI587384, |
| | | | | | AA827770, AW182646, AI127888, |
| | | | | | H89128, AI268557, D62713, T63317, |
| | | | | | R35227, AA018661, AW023089, N67948, |
| | | | | | T62565, H01498, R21841, AW151373, |
| | | | | | D29213, AW022288, AA678512, and |
| | | | | | AB023187. |
| HLHCT68 | 80 | 764745 | 1-425 | 15-439 | R91150, H67895, AI205078, Z25012, |
| | | | | | C05212, Z30134, AA194359, AC010344, |
| | | | | | AC010344, AC010344, AC008496, and |
| | | | | | AC008496. |
| HMAMB94 | 81 | 910909 | 1-627 | 15-641 | AA158332, R90961, R90977, and R90972. |
| HNTAF23 | 82 | 910947 | 1-239 | 15-253 | AW392670, AL119355, AW372827, |
| | | | | | U46341, AL119483, AL119319, U46349, |
| | | | | | AL119457, AL119324, AW384394, |
| | | | | | AL119497, AW363220, Z99396, |
| | | | | | AL134920, AL134524, AL119484, |
| | | | | | AL119363, AL119391, U46350, U46347, |
| | | | | | U46351, AL119443, AL119444, |
| | | | | | AI142137, AL119341, AL134538, |
| | | | | | AL119439, AL119522, AL119396, |
| | | | | | U46346, AL043029, AL037205, |
| | | | | | AL134531, AL1 19335, AL042614, |
| | | | | | AL119399, AI142139, AL119496, |
| | | | | | AL134533, AL1 19418, U46345, |
| | | | | | AL043011, AL042984, AL043019, |
| | | | | | AL042544, AL042896, AL043033, |
| | | | | | AL042965, AL042975, AL042450, |
| | | | | | AL042542, AL043003, AL119464, |
| | | | | | AL042551, AB026436, A81671, |
| | | | | | AR060234, AR054110, AR066494, |
| | | | | | AR069079, and AR043113. |
| HTEED80 | 83 | 849075 | 1-1299 | 15-1313 | W87655, AA465429, AA203572, |
| | | | | | AI479983, AI540082, AA192438, |
| | | | | | AA836236, AA465358, AA8294 19, |
| | | | | | AA507269, AW290970, AI796504, |
| | | | | | AA904433, AA368409, AA688079, |
| | | | | | AW189971, AA601527, AA393948, |
| | | | | | F36549, W87656, AA320120, AI862710, |
| | | | | | F30605, AA196706, and AJ242978. |
| HTLAQ18 | 84 | 811792 | 1-649 | 15-663 | AA442624, AI382107, AA009701, and |
| | | | | | AL133054. |
| HNHAF61 | 85 | 1093210 | 1-1015 | 15-1029 | |
| HNTSN26 | 86 | 1154066 | 1-1342 | 15-1356 | |
| HPWBS63 | 87 | 1153910 | 1-423 | 15-437 | |
| HBODA38 | 88 | 923456 | 1-1882 | 15-1896 | AA196401, W79841, AA112831, |
| | | | | | AA197134, C05212, W19681, AA195812, |
| | | | | | Z25012, AI004215, Z30134, AA194641, |
| | | | | | AI809925, AA258550, Z28480, F29 133, |
| | | | | | AA699576, F20387, AI129717, |
| | | | | | AA194359, AI079487, AA195355, |
| | | | | | AA195094, AA931319, F34387, Z19343, |
| | | | | | F36761, H67895, AA258604, AI378821, |
| | | | | | F19321, AI089231, R91150, AI702453, |
| | | | | | AI288969, AI313118, AI351843, F31038, |
| | | | | | N56278, AI381419, AA195356, |
| | | | | | AA131264, AA195051, AA192095, |
| | | | | | AI264911, and AA086284. |
| HEONO59 | 89 | 741361 | 1-848 | 15-862 | W37916, AW369323, AL138197, |
| | | | | | AA292636, AA789205, AA278688, |
| | | | | | AI077497, AI670821, AW117287, |
| | | | | | AA608906, AA382777, AA724269, |
| | | | | | AA278680, AA827227, AI160796, |
| | | | | | AA600253, AI990171, AA625768, |
| | | | | | W37874, AA421286, AA292637, |
| | | | | | AA844108, AA917528, AW316905, |
| | | | | | AA768446, and AF117210. |
| HSSJM44 | 90 | 871067 | 1-1034 | 15-1048 | AA402834, AA313382, T75200, H10173, |
| | | | | | Z46198, T34442, R13072, AA357096, |
| | | | | | AA383450, T07941, AC026352, |
| | | | | | AC026352, AC069443, AC069443, |
| | | | | | AC068755, and AC068755. |
| HEQAY32 | 91 | 869178 | 1-1169 | 15-1183 | AA459604, AA703415, AA703508, |
| | | | | | AI337830, AI924185, AA993540, |
| | | | | | AA398958, AA047107, AI581879, |
| | | | | | R50486, AA399541, AA826082, |
| | | | | | AA047244, AI570681, AW007699, |
| | | | | | AA742413, AI278602, AI479681, |
| | | | | | AA810070, AI346375, AI468327, |
| | | | | | AA766769, AI721136, AA317334, |
| | | | | | AI378094, H08229, AA878088, AI269575, |
| | | | | | T36249, AA878089, M78847, H08868, |
| | | | | | AW138078, AA322162, AI824732, |
| | | | | | F04540, F04098, AI383526, F02816, |
| | | | | | R50380, AA383971, AI444981, AI953863, |
| | | | | | and AB033004. |
| HAMFL82 | 92 | 910074 | 1-489 | 15-503 | T78839, and AB029015. |
| HCE5I78 | 93 | 934531 | 1-408 | 15-422 | AB023202, D13613, D29965, AC004551, |
| | | | | | and AC004465. |
| HCE5J51 | 94 | 1195672 | 1-2905 | 15-2919 | |
| HCEEN06 | 95 | 1150643 | 1-758 | 15-772 | |
| HCEPU56 | 96 | 920347 | 1-652 | 15-666 | AI299974, AL134903, AA326624, |
| | | | | | W49831, AC004381, AF227510, |
| | | | | | AC004381, and AC004381. |
| HDPKI83 | 97 | 883382 | 1-781 | 15-795 | AA287508, W15561, N80792, AA922507, |
| | | | | | and AF159356. |
| HDPRU43 | 98 | 1221959 | 1-3030 | 15-3044 | |
| HE8QH09 | 99 | 1146260 | 1-875 | 15-889 | |
| HE8UX76 | 100 | 1161437 | 1-1760 | 15-1774 | |
| HEGAP32 | 101 | 851207 | 1-385 | 15-399 | AI814253, AW192239, H72014, |
| | | | | | AW338148, AL137708, AC051649, |
| | | | | | AC051649, AC051649, and AC069103. |
| HETJX04 | 102 | 927120 | 1-848 | 15-862 | AA853282, AA370481, AA625156, |
| | | | | | AB025258, AB025259, AL390040, and |
| | | | | | AL390040. |
| HFAAX29 | 103 | 934540 | 1-822 | 15-836 | AL119825, AW367632, AA333024, |
| | | | | | AA164770, N53725, AA984472, N44616, |
| | | | | | AF000423, AB026808, and D38522. |
| HFIAH37 | 104 | 1188885 | 1-1704 | 15-1718 | |
| HFIVB68 | 105 | 752981 | 1-821 | 15-835 | AA332003, AB033033, AF182316, |
| | | | | | AF182317, AL096713, AL137223, |
| | | | | | AL365364, and AL365364. |
| HFPBW22 | 106 | 1151651 | 1-1415 | 15-1429 | |
| HFPHI62 | 107 | 934529 | 1-1690 | 15-1704 | N94873, AA663569, R88023,H15589, |
| | | | | | H38492, R88479, R90757, AA338374, |
| | | | | | R18083, AA325807, H10745, R13057, |
| | | | | | AA325143, W28283, AB023202, |
| | | | | | AC004551, D13613, D29965, U12571, |
| | | | | | and AC004551. |
| HFTDY67 | 108 | 745221 | 1-285 | 15-299 | AI751815, N42174, AI335266, AF182317, |
| | | | | | AF182316, AB033033, AL137223, |
| | | | | | AL137223, AL137223, AL360229, and |
| | | | | | AL360229. |
| HFXLC69 | 109 | 1161235 | 1-1631 | 15-1645 | |
| HHEFQ42 | 110 | 1227523 | 1-2209 | 15-2223 | |
| HKAAR71 | 111 | 863023 | 1-963 | 15-977 | AW068487, AW239526, T19084, R73854, |
| | | | | | AA984561, AA190644, R22358, R14385, |
| | | | | | AI968382, AA773650, AA425030, |
| | | | | | AW237628, AJ242972, and AJ242971. |
| HLHBC30 | 112 | 910079 | 1-568 | 15-582 | AI366170, AA047627, AA047570, |
| | | | | | W21960, W22094, W22769, AA359453, |
| | | | | | AA359449, AA128575, AI220321, |
| | | | | | W22833, AC012510, AC012510, and |
| | | | | | AC012510. |
| HLQDC55 | 113 | 934528 | 1-525 | 15-539 | |
| HMCFS02 | 114 | 969326 | 1-483 | 15-497 | AA465115, C06235, and T10782 |
| HMEGH46 | 115 | 887791 | 1-363 | 15-377 | AB033054. |
| HMSBZ24 | 116 | 678707 | 1-308 | 15-322 | H14236. |
| HOHBN82 | 117 | 724322 | 1-617 | 15-631 | AI751901, AI040116, AF182316, and |
| | | | | | AF182317. |
| HPFCU80 | 118 | 685294 | 1-328 | 15-342 | AC005344, AC005344, and AC005344. |
| HPJCR33 | 119 | 966758 | 1-361 | 15-375 | AI273639, T85104, AA910341, |
| | | | | | AA811271, AA252905, W02957, H96557, |
| | | | | | W02571, AA015718, AI589791, and |
| | | | | | AC005562. |
| HSCKS55 | 120 | 1195856 | 1-2258 | 15-2272 | |
| HSPBQ12 | 121 | 1191772 | 1-4821 | 15-4835 | |
| HSYBX32 | 122 | 909846 | 1-216 | 15-230 | AA078429, AC004084, AB011110, |
| | | | | | AC004951, AC004951, AC004951, |
| | | | | | AC004084, AC004084, and AC004084. |
| HTAHB43 | 123 | 909845 | 1-902 | 15-916 | AA077657, AA076731, AA077825, |
| | | | | | AI768799, AW373785, AI963990, |
| | | | | | AB011110, AC004084, AC004985, |
| | | | | | AC004084, AC004084, and AC004084. |
| HTBAB41 | 124 | 867287 | 1-475 | 15-489 | AA382198, and H58945. |
| HTEDF74 | 125 | 522982 | 1-562 | 15-576 | AI948732, AA663155, AC025517, |
| | | | | | AC025517, and AC025517. |
| HTEFO45 | 126 | 1150975 | 1-962 | 15-976 | |
| HTNGF69 | 127 | 1151100 | 1-1036 | 15-1050 | |
| HTXRA13 | 128 | 959622 | 1-1150 | 15-1164 | AI701008, N92159, AA363885, AI990716, |
| | | | | | AW197467, and AW291923. |
| HUSHB54 | 129 | 928054 | 1-343 | 15-357 | AA348022. |
| HWHQC94 | 130 | 715096 | 1-617 | 15-631 | AI366191, AC004472, AC005259, |
| | | | | | AC004472, AC004472, AC004472, and |
| | | | | | AL353795. |
| HWLHK29 | 131 | 1195515 | 1-3929 | 15-3943 | |
| HYABL89 | 132 | 786157 | 1-699 | 15-713 | AC009242, AC009242, and AC009242. |
| HAIDO94 | 133 | 1104652 | 1-514 | 15-528 | |
| HBJIH60 | 134 | 1151461 | 1-1385 | 15-1399 | |
| HCE3P22 | 135 | 1151160 | 1-917 | 15-931 | |
| HCE5L27 | 136 | 1104541 | 1-467 | 15-481 | |
| HCHNW48 | 137 | 1103908 | 1-816 | 15-830 | |
| HCUEU74 | 138 | 576538 | 1-171 | 15-185 | AP001320, AP001320, AP000663, and |
| | | | | | AP000663. |
| HDPCM62 | 139 | 454740 | 1-45 | 15-465 | AC067849, and AC067849. |
| HDPYA61 | 140 | 1226158 | 1-2719 | 15-2733 | |
| HDSAK19 | 141 | 1124584 | 1-1904 | 15-1918 | |
| HDTJI37 | 142 | 1193037 | 1-1251 | 15-1265 | |
| HE21O96 | 143 | 796075 | 1-542 | 15-556 | |
| HEPCP91 | 144 | 1142257 | 1-1633 | 15-1647 | |
| HFGAL44 | 145 | 1150869 | 1-646 | 15-660 | |
| HFIUM16 | 146 | 661845 | 1-334 | 15-348 | AC067849, and AC067849. |
| HFPAC33 | 147 | 1024217 | 1-604 | 15-618 | |
| HFXBJ04 | 148 | 1068099 | 1-344 | 15-358 | |
| HHENY30 | 149 | 1177596 | 1-846 | 15-860 | |
| HHFGV79 | 150 | 573532 | 1-273 | 15-287 | AC022468, and AC022468. |
| HHSAL11 | 151 | 967685 | 1-479 | 15-493 | |
| HKADH21 | 152 | 1104904 | 1-697 | 15-711 | |
| HLDON90 | 153 | 1151492 | 1-643 | 15-657 | |
| HLTAZ78 | 154 | 1150875 | 1-1300 | 15-1314 | |
| HMMAL17 | 155 | 662379 | 1-388 | 15-402 | AC067849, and AC067849. |
| HOFMB78 | 156 | 1193496 | 1-1015 | 15-1029 | |
| HSDAG13 | 157 | 968438 | 1-198 | 15-212 | |
| HSOAM03 | 158 | 1103422 | 1-750 | 15-764 | |
| HT4CL71 | 159 | 997265 | 1-1270 | 15-1284 | |
| HTDAB58 | 160 | 1124511 | 1-1599 | 15-1613 | |
| HTJAC60 | 161 | 1219940 | 1-1253 | 15-1267 | |
| HTLGG79 | 162 | 1162668 | 1-1653 | 15-1667 | |
| HTLIA13 | 163 | 978283 | 1-310 | 15-324 | |
| HTXJY67 | 164 | 1151522 | 1-1418 | 15-1432 | |
| HUSIJ47 | 165 | 1124748 | 1-546 | 15-560 | |
| HWAFS34 | 166 | 1106346 | 1-548 | 15-562 | |
| HAJAB73 | 167 | 1220029 | 1-2148 | 15-2162 | |
| HDTBD67 | 168 | 1164345 | 1-2233 | 15-2247 | |
| HOHCS04 | 169 | 1198730 | 1-1857 | 15-1871 | |
| HEBFI10 | 170 | 956734 | 1-4061 | 15-420 | |
| HSHCM81 | 171 | 911410 | 1-1012 | 15-1026 | AL359384. |

[0102] TABLE 4

| | | | | | | |
|---|---|---|---|---|---|---|
| Code | Description | Tissue | Organ | Cell Line | Disease | +HBL,46 Vector |

| | | | | | | | |
|---|---|---|---|---|---|---|---|
| AR022 | a_Heart | a_Heart | | | | | |
| AR023 | a_Liver | a_Liver | | | | | |
| AR024 | a_mammary gland | a_mammary gland | | | | | |
| AR025 | a_Prostate | a Prostate | | | | | |
| AR026 | a_small intestine | a_small intestine | | | | | |
| AR027 | a_Stomach | a_Stomach | | | | | |
| AR028 | Blood B cells | Blood B cells | | | | | |
| AR029 | Blood B cells activated | Blood B cells | | | | | |
| | | activated | | | | | |
| AR030 | Blood B cells resting | Blood B cells | | | | | |
| | | resting | | | | | |
| AR031 | Blood T cells activated | Blood T cells | | | | | |
| | | activated | | | | | |
| AR032 | Blood T cells resting | Blood T cells resting | | | | | |
| AR033 | brain | brain | | | | | |
| AR034 | breast | breast | | | | | |
| AR035 | breast cancer | breast cancer | | | | | |
| AR036 | Cell Line CAOV3 | Cell Line CAOV3 | | | | | |
| AR037 | cell line PA-1 | cell line PA-1 | | | | | |
| AR038 | cell line transformed | cell line transformed | | | | | |
| AR039 | colon | colon | | | | | |
| AR040 | colon (9808co65R) | colon (9808co65R) | | | | | |
| AR041 | colon (9809co15) | colon (9809co15) | | | | | |
| AR042 | colon cancer | colon cancer | | | | | |
| AR043 | colon cancer | colon cancer | | | | | |
| | (9808co64R) | (9808co64R) | | | | | |
| AR044 | colon cancer 9809co14 | colon cancer | | | | | |
| | | 9809co14 | | | | | |
| AR045 | corn clone 5 | corn clone 5 | | | | | |
| AR046 | corn clone 6 | corn clone 6 | | | | | |
| AR047 | corn clone 2 | corn clone 2 | | | | | |
| AR048 | corn clone 3 | corn clone 3 | | | | | |
| AR049 | Corn Clone 4 | Corn Clone 4 | | | | | |
| AR050 | Donor II B Cells 24 hrs | Donor II B Cells | | | | | |
| | | 24 hrs | | | | | |
| AR051 | Donor II B Cells 72 hrs | Donor II B Cells | | | | | |
| | | 72 hrs | | | | | |
| AR052 | Donor II B-Cells 24 hrs. | Donor II B-Cells | | | | | |
| | | 24 hrs. | | | | | |
| AR053 | Donor II B-Cells 72 hrs | Donor II B-Cells | | | | | |
| | | 72 hrs | | | | | |
| AR054 | Donor II Resting B Cells | Donor II Resting B | | | | | |
| | | Cells | | | | | |
| AR055 | Heart | Heart | | | | | |
| AR056 | Human Lung | Human Lung | | | | | |
| | (clonetech) | (clonetech) | | | | | |
| AR057 | Human Mammary | Human Mammary | | | | | |
| | (clontech) | (clontech) | | | | | |
| AR058 | Human Thymus | Human Thymus | | | | | |
| | (clonetech) | (clonetech) | | | | | |
| AR059 | Jurkat (unstimulated) | Jurkat | | | | | |
| | | (unstimulated) | | | | | |
| AR060 | Kidney | Kidney | | | | | |
| AR061 | | Liver | Liver | | | | |
| AR062 | Liver (Clontech) | Liver (Clontech) | | | | | |
| AR063 | Lymphocytes chronic | Lymphocytes | | | | | |
| | lymphocytic leukaemia | chronic lymphocytic | | | | | |
| | | leukaemia | | | | | |
| AR064 | Lymphocytes diffuse | Lymphocytes | | | | | |
| | large B cell lymphoma | diffuse large B cell | | | | | |
| | | lymphoma | | | | | |
| AR065 | Lymphocytes follicular | Lymphocytes | | | | | |
| | lymphoma | follicular lymphoma | | | | | |
| AR066 | normal breast | normal breast | | | | | |
| AR067 | Normal Ovarian | Normal Ovarian | | | | | |
| | (4004901) | (4004901) | | | | | |
| AR068 | Normal Ovary | Normal Ovary | | | | | |
| | 9508G045 | 9508G045 | | | | | |
| AR069 | Normal Ovary | Normal Ovary | | | | | |
| | 9701G208 | 9701G208 | | | | | |
| AR070 | Normal Ovary | Normal Ovary | | | | | |
| | 9806G005 | 9806G005 | | | | | |
| AR071 | Ovarian Cancer | Ovarian Cancer | | | | | |
| AR072 | Ovarian Cancer | Ovarian Cancer | | | | | |
| | (9702G001) | (9702G001) | | | | | |
| AR073 | Ovarian Cancer | Ovarian Cancer | | | | | |
| | (9707G029) | (9707G029) | | | | | |
| AR074 | Ovarian Cancer | Ovarian Cancer | | | | | |
| | (9804G011) | (9804G011) | | | | | |
| AR075 | Ovarian Cancer | Ovarian Cancer | | | | | |
| | (9806G019) | (9806G019) | | | | | |
| AR076 | Ovarian Cancer | Ovarian Cancer | | | | | |
| | (9807G017) | (9807G017) | | | | | |
| AR077 | Ovarian Cancer | Ovarian Cancer | | | | | |
| | (9809G001) | (9809G001) | | | | | |
| AR078 | ovarian cancer 15799 | ovarian cancer | | | | | |
| | | 15799 | | | | | |
| AR079 | Ovarian Cancer | Ovarian Cancer | | | | | |
| | 17717AID | 17717AID | | | | | |
| AR080 | Ovarian Cancer | Ovarian Cancer | | | | | |
| | 4004664B1 | 4004664B1 | | | | | |
| AR081 | Ovarian Cancer | Ovarian Cancer | | | | | |
| | 4005315A1 | 4005315A1 | | | | | |
| AR082 | ovarian cancer | ovarian cancer | | | | | |
| | 94127303 | 94127303 | | | | | |
| AR083 | Ovarian Cancer | Ovarian Cancer | | | | | |
| | 96069304 | 96069304 | | | | | |
| AR084 | Ovarian Cancer | Ovarian Cancer | | | | | |
| | 9707G029 | 9707G029 | | | | | |
| AR085 | Ovarian Cancer | Ovarian Cancer | | | | | |
| | 9807G045 | 9807G045 | | | | | |
| AR086 | ovarian cancer | ovarian cancer | | | | | |
| | 9809G001 | 9809G001 | | | | | |
| AR087 | Ovarian Cancer | Ovarian Cancer | | | | | |
| | 9905C032RC | 9905C032RC | | | | | |
| AR088 | Ovarian cancer 9907 | Ovarian cancer 9907 | | | | | |
| | C00 3rd | C00 3rd | | | | | |
| AR089 | Prostate | Prostate | | | | | |
| AR090 | Prostate (clonetech) | Prostate (clonetech) | | | | | |
| AR091 | prostate cancer | prostate cancer | | | | | |
| AR092 | prostate cancer #15176 | prostate cancer | | | | | |
| | | #15176 | | | | | |
| AR093 | prostate cancer #15509 | prostate cancer | | | | | |
| | | #15509 | | | | | |
| AR094 | prostate cancer #15673 | prostate cancer | | | | | |
| | | #15673 | | | | | |
| AR095 | Small Intestine | Small Intestine | | | | | |
| | (Clontech) | (Clontech) | | | | | |
| AR096 | Spleen | Spleen | | | | | |
| AR097 | Thymus T cells | Thymus T cells | | | | | |
| | activated | activated | | | | | |
| AR098 | Thymus T cells resting | Thymus T cells | | | | | |
| | | resting | | | | | |
| AR099 | Tonsil | Tonsil | | | | | |
| AR100 | Tonsil geminal center | Tonsil geminal | | | | | |
| | centroblast | center centroblast | | | | | |
| AR101 | Tonsil germinal center B | Tonsil germinal | | | | | |
| | cell | center B cell | | | | | |
| AR102 | Tonsil lymph node | Tonsil lymph node | | | | | |
| AR103 | Tonsil memory B cell | Tonsil memory B | | | | | |
| | | cell | | | | | |
| AR104 | Whole Brain | Whole Brain | | | | | |
| AR105 | Xenograft ES-2 | Xenograft ES-2 | | | | | |
| AR106 | Xenograft SW626 | Xenograft SW626 | | | | | |
| H0007 | Human Cerebellum | Human Cerebellum | Brain | | | Uni-ZAP XR | |
| H0009 | Human Fetal Brain | | | | | Uni-ZAP XR | |
| H0012 | Human Fetal Kidney | Human Fetal Kidney | Kidney | | | Uni-ZAP XR | |
| H0013 | Human 8 Week Whole | Human 8 Week Old | Embryo | | | Uni-ZAP XR | |
| | Embryo | Embryo | | | | | |
| H0014 | Human Gall Bladder | Human Gall Bladder | Gall Bladder | | | Uni-ZAP XR | |
| H0020 | Human Hippocampus | Human | Brain | | | Uni-ZAP XR | |
| | | Hippocampus | | | | | |
| H0024 | Human Fetal Lung III | Human Fetal Lung | Lung | | | Uni-ZAP XR | |
| H0028 | Human Old Ovary | Human Old Ovary | Ovary | | | pBluescript | |
| H0030 | Human Placenta | | | | | Uni-ZAP XR | |
| H0031 | Human Placenta | Human Placenta | Placenta | | | Uni-ZAP XR | |
| H0032 | Human Prostate | Human Prostate | Prostate | | | Uni-ZAP XR | |
| H0033 | Human Pituitary | Human Pituitary | | | | Uni-ZAP XR | |
| H0036 | Human Adult Small | Human Adult Small | Small Int. | | | Uni-ZAP XR | |
| | Intestine | Intestine | | | | | |
| H0038 | Human Testes | Human Testes | Testis | | | Uni-ZAP XR | |
| H0039 | Human Pancreas Tumor | Human Pancreas | Pancreas | | disease | Uni-ZAP XR | |
| | | Tumor | | | | | |
| H0040 | Human Testes Tumor | Human Testes | Testis | | disease | Uni-ZAP XR | |
| | | Tumor | | | | | |
| H0041 | Human Fetal Bone | Human Fetal Bone | Bone | | | Uni-ZAP XR | |
| HO042 | Human Adult | Human Adult | Lung | | | Uni-ZAP XR | |
| | Pulmonary | Pulmonary | | | | | |
| H0046 | Human Endometrial | Human Endometrial | Uterus | | disease | Uni-ZAP XR | |
| | Tumor | Tumor | | | | | |
| H0049 | Human Fetal Kidney | Human Fetal Kidney | Kidney | | | Uni-ZAP XR | |
| H0050 | Human Fetal Heart | Human Fetal Heart | Heart | | | Uni-ZAP XR | |
| H0051 | Human Hippocampus | Human | Brain | | | Uni-ZAP XR | |
| | | Hippocampus | | | | | |
| H0052 | Human Cerebellum | Human Cerebellum | Brain | | | Uni-ZAP XR | |
| H0053 | Human Adult Kidney | Human Adult | Kidney | | | Uni-ZAP XR | |
| | | Kidney | | | | | |
| H0056 | Human Umbilical Vein, | Human Umbilical | Umbilical | | | Uni-ZAP XR | |
| | Endo. remake | Vein Endothelial | vein | | | | |
| | | Cells | | | | | |
| H0059 | Human Uterine Cancer | Human Utenne | Uterus | | disease | Lambda ZAP II | |
| | | Cancer | | | | | |
| H0063 | Human Thymus | Human Thymus | Thymus | | | Uni-ZAP XR | |
| H0068 | Human Skin Tumor | Human Skin Tumor | Skin | | disease | Uni-ZAP XR | |
| H0069 | Human Activated T- | Activated T-Cells | Blood | Cell Line | | Uni-ZAP XR | |
| | Cells | | | | | | |
| H0075 | Human Activated T- | Activated T-Cells | Blood | Cell Line | | Uni-ZAP XR | |
| | Cells (II) | | | | | | |
| H0081 | Human Fetal Epithelium | Human Fetal Skin | Skin | | | Uni-ZAP XR | |
| | (Skin) | | | | | | |
| H0082 | Human Fetal Muscle | Human Fetal Muscle | Sk Muscle | | | Uni-ZAP XR | |
| H0083 | HUMAN JURKAT | Jurkat Cells | | | | Uni-ZAP XR | |
| | MEMBRANE BOUND | | | | | | |
| | POLYSOMES | | | | | | |
| H0085 | Human Colon | Human Colon | | | | Lambda ZAP II | |
| H0086 | Human epithelioid | Epithelioid | Sk Muscle | | disease | Uni-ZAP XR | |
| | sarcoma | Sarcoma, muscle | | | | | |
| H0087 | Human Thymus | Human Thymus | | | | pBluescript | |
| H0090 | Human T-Cell | T-Cell Lymphoma | T-Cell | | disease | Uni-ZAP XR | |
| | Lymphoma | | | | | | |
| H0099 | Human Lung Cancer, | Human Lung Cancer | Lung | | | pBluescript | |
| | subtracted | | | | | | |
| H0100 | Human Whole Six | Human Whole Six | Embryo | | | Uni-ZAP XR | |
| | Week Old Embryo | Week Old Embryo | | | | | |
| H0111 | Human Placenta, | Human Placenta | Placenta | | | pBluescript | |
| | subtracted | | | | | | |
| H0116 | Human Thymus Tumor, | Human Thymus | Thymus | | | pBluescript | |
| | subtracted | Tumor | | | | | |
| H0123 | Human Fetal Dura | Human Fetal Dura | Brain | | | Uni-ZAP XR | |
| | Mater | Mater | | | | | |
| H0124 | Human | Human | Sk Muscle | | disease | Uni-ZAP XR | |
| | Rhabdomyosarcoma | Rhabdomyosarcoma | | | | | |
| H0125 | Cem cells | Cyclohexamide | Blood | Cell Line | | Uni-ZAP XR | |
| | cyclohexamide treated | Treated Cem, Jurkat, | | | | | |
| | | Raji, and Supt | | | | | |
| H0130 | LNCAP untreated | LNCAP Cell Line | Prostate | Cell Line | | Uni-ZAP XR | |
| H0132 | LNCAP + 30 nM R1881 | LNCAP Cell Line | Prostate | Cell Line | | Uni-ZAP XR | |
| H0134 | Raji Cells, | Cyclohexamide | Blood | Cell Line | | Uni-ZAP XR | |
| | cyclohexamide treated | Treated Cem, Jurkat, | | | | | |
| | | Raji, and Supt | | | | | |
| H0135 | Human Synovial | Human Synovial | Synovium | | | Uni-ZAP XR | |
| | Sarcoma | Sarcoma | | | | | |
| H0136 | Supt Cells, | Cyclohexamide | Blood | Cell Line | | Uni-ZAP XR | |
| | cyclohexamide treated | Treated Cem, Jurkat, | | | | | |
| | | Raji, and Supt | | | | | |
| H0141 | Activated T-Cells, 12 | Activated T-Cells | Blood | Cell Line | | Uni-ZAP XR | |
| | hrs. | | | | | | |
| H0144 | Nine Week Old Early | 9 Wk Old Early | Embryo | | | Uni-ZAP XR | |
| | Stage Human | Stage Human | | | | | |
| H0147 | Human Adult Liver | Human Adult Liver | Liver | | | Uni-ZAP XR | |
| H0150 | Human Epididymus | Epididymis | Testis | | | Uni-ZAP XR | |
| H0156 | Human Adrenal Gland | Human Adrenal | Adrenal | | disease | Uni-ZAP XR | |
| | Tumor | Gland Tumor | Gland | | | | |
| H0159 | Activated T-Cells, 8 | Activated T-Cells | Blood | Cell Line | | Uni-ZAP XR | |
| | hrs., ligation 2 | | | | | | |
| H0163 | Human Synovium | Human Synovium | Synovium | | | Uni-ZAP XR | |
| H0165 | Human Prostate Cancer, | Human Prostate | Prostate | | disease | Uni-ZAP XR | |
| | Stage B2 | Cancer, stage B2 | | | | | |
| H0166 | Human Prostate Cancer, | Human Prostate | Prostate | | disease | Uni-ZAP XR | |
| | Stage B2 fraction | Cancer, stage B2 | | | | | |
| H0169 | Human Prostate Cancer, | Human Prostate | Prostate | | disease | Uni-ZAP XR | |
| | Stage C fraction | Cancer, stage C | | | | | |
| H0170 | 12 Week Old Early | Twelve Week Old | Embryo | | | Uni-ZAP XR | |
| | Stage HumanEarly Stage Human | | | | | | |
| H0171 | 12 Week Old Early | Twelve Week Old | Embryo | | | Uni-ZAP XR | |
| | Stage Human, II | Early Stage Human | | | | | |
| H0172 | Human Fetal Brain, | Human Fetal Brain | Brain | | | Lambda ZAP II | |
| | random primed | | | | | | |
| H0178 | Human Fetal Brain | Human Fetal Brain | Brain | | | Uni-ZAP XR | |
| H0179 | Human Neutrophil | Human Neutrophil | Blood | Cell Line | | Uni-ZAP XR | |
| H0181 | Human Primary Breast | Human Primary | Breast | | disease | Uni-ZAP XR | |
| | Cancer | Breast Cancer | | | | | |
| H0187 | Resting T-Cell | T-Cells | Blood | Cell Line | | Lambda ZAP II | |
| H0188 | Human Normal Breast | Human Normal | Breast | | | Uni-ZAP XR | |
| | | Breast | | | | | |
| H0190 | Human Activated | Human | Blood | Cell Line | | Uni-ZAP XR | |
| | Macrophage (LPS) | Macrophage/Monocytes | | | | | |
| H0192 | Cem Cells, | Cyclohexamide | Blood | Cell Line | | Uni-ZAP XR | |
| | cyclohexamide treated, | Treated Cem, Jurkat, | | | | | |
| | subtra | Raji, and Supt | | | | | |
| H0194 | Human Cerebellum, | Human Cerebellum | Brain | | | pBluescript | |
| | subtracted | | | | | | |
| H0196 | Human | Human | Heart | | | Uni-ZAP XR | |
| | Cardiomyopathy, | Cardiomyopathy | | | | | |
| | subtracted | | | | | | |
| H0205 | Early Stage Human | Human Fetal Lung | Lung | | | pBluescript | |
| | Lung, subtracted | | | | | | |
| H0213 | Human Pituitary, | Human Pituitary | | | | Uni-ZAP XR | |
| | subtracted | | | | | | |
| H0229 | Early Stage Human | Early Stage Human | Brain | | | Lambda ZAP II | |
| | Brain, random primed | Brain | | | | | |
| H0235 | Human colon cancer, | Human Colon | Liver | | | pBluescript | |
| | metaticized to liver, | Cancer, metasticized | | | | | |
| | subtraction | to liver | | | | | |
| H0242 | Human Fetal Heart, | Human Fetal Heart | Heart | | | pBluescript | |
| | Differential (Fetal- | | | | | | |
| | Specific) | | | | | | |
| H0244 | Human 8 Week Whole | Human 8 Week Old | Embryo | | | Uni-ZAP XR | |
| | Embryo, subtracted | Embryo | | | | | |
| H0250 | Human Activated | Human Monocytes | | | | Uni-ZAP XR | |
| | Monocytes | | | | | | |
| H0251 | Human | Human | Cartilage | | disease | Uni-ZAP XR | |
| | Chondrosarcoma | Chondrosarcoma | | | | | |
| H0252 | Human Osteosarcoma | Human | Bone | | disease | Uni-ZAP XR | |
| | | Osteosarcoma | | | | | |
| H0253 | Human adult testis, large | Human Adult Testis | Testis | | | Uni-ZAP XR | |
| | inserts | | | | | | |
| H0254 | Breast Lymph node | Breast Lymph Node | Lymph Node | | | Uni-ZAP XR | |
| | cDNA library | | | | | | |
| H0255 | breast lymph node | Breast Lymph Node | Lymph Node | | | Lambda ZAP II | |
| | CDNA library | | | | | | |
| H0261 | H. cerebellum, Enzyme | Human Cerebellum | Brain | | | Uni-ZAP XR | |
| | subtracted | | | | | | |
| H0263 | human colon cancer | Human Colon | Colon | | disease | Lambda ZAP II | |
| | | Cancer | | | | | |
| H0264 | human tonsils | Human Tonsil | Tonsil | | | Uni-ZAP XR | |
| H0265 | Activated T-Cell | T-Cells | Blood | Cell Line | | Uni-ZAP XR | |
| | (12 hs)/Thiouridine | | | | | | |
| | labelledEco | | | | | | |
| H0266 | Human Microvascular | HMEC | Vein | Cell Line | | Lambda ZAP II | |
| | Endothelial Cells, fract. | | | | | | |
| | A | | | | | | |
| H0267 | Human Microvascular | HMEC | Vein | Cell Line | | Lambda ZAP II | |
| | Endothelial Cells, fract. | | | | | | |
| | B | | | | | | |
| H0268 | Human Umbilical Vein | HUVE Cells | Umbilical | Cell Line | | Lambda ZAP II | |
| | Endothelial Cells, fract. | | vein | | | | |
| | A | | | | | | |
| H0269 | Human Umbilical Vein | HUVE Cells | Umbilical | Cell Line | | Lambda ZAP II | |
| | Endothelial Cells, fract. | | vein | | | | |
| | B | | | | | | |
| H0271 | Human Neutrophil, | Human Neutrophil- | Blood | Cell Line | | Uni-ZAP XR | |
| | Activated | Activated | | | | | |
| H0272 | HUMAN TONSILS, | Human Tonsil | Tonsil | | | Uni-ZAP XR | |
| | FRACTION 2 | | | | | | |
| H0284 | Human OB MG63 | Human | Bone Cell Line | | Uni-ZAP XR | | |
| | control fraction I | Osteoblastoma | | | | | |
| | | MG63 cell line | | | | | |
| H0286 | Human OB MG63 | Human | Bone | Cell Line | | Uni-ZAP XR | |
| | treated (10 nM E2) | Osteoblastoma | | | | | |
| | fraction I | MG63 cell line | | | | | |
| H0288 | Human OB HOS control | Human | Bone | Cell Line | | Uni-ZAP XR | |
| | fraction I | Osteoblastoma HOS | | | | | |
| | | cell line | | | | | |
| H0290 | Human GB HOS treated | Human | Bone | Cell Line | | Uni-ZAP XR | |
| | (1 nM E2) fraction I | Osteoblastoma HOS | | | | | |
| | | cell line | | | | | |
| H0292 | Human GB HOS treated | Human | Bone | Cell Line | | Uni-ZAP XR | |
| | (10 nM E2) fraction I | Osteoblastoma HOS | | | | | |
| | | cell line | | | | | |
| H0293 | WI 38 cells | | | | | Uni-ZAP XR | |
| H0294 | Anmiotic Cells-TNF | Amniotic Cells- | Placenta | Cell Line | | Uni-ZAP XR | |
| | induced | TNF induced | | | | | |
| H0295 | Amniotic Cells- | Amniotic Cells- | Placenta | Cell Line | | Uni-ZAP XR | |
| | Primary Culture | Primary Culture | | | | | |
| H0305 | CD34 positive cells | CD34 Positive Cells | Cord Blood | | | ZAP Express | |
| | (Cord Blood) | | | | | | |
| H0306 | CD34 depleted Buffy | CD34 Depleted | Cord Blood | | | ZAP Express | |
| | Coat (Cord Blood) | Buffy Coat (Cord | | | | | |
| | | Blood) | | | | | |
| H0309 | Human Chronic | Synovium, Chronic | Synovium | | disease | Uni-ZAP XR | |
| | Synovitis | Synovitis | | | | | |
| H0318 | HUMAN B CELL | Human B Cell Lymph Node | | disease | Uni-ZAP XR | | |
| | LYMPHOMA | Lymphoma | | | | | |
| H0327 | human corpus colosum | Human Corpus | Brain | | | Uni-ZAP XR | |
| | | Callosum | | | | | |
| H0328 | human ovarian cancer | Ovarian Cancer | Ovary | | disease | Uni-ZAP XR | |
| H0329 | Dermatofibrosarcoma | Dermatofibrosarcom | Skin | | disease | Uni-ZAP XR | |
| | Protuberance | a Protuberans | | | | | |
| H0331 | Hepatocellular Tumor | Hepatocellular | Liver | | disease | Lambda ZAP II | |
| | | Tumor | | | | | |
| H0333 | Hemangiopericytoma | Hemangiopericytoma | Blood vessel | | disease | Lambda ZAP II | |
| H0341 | Bone Marrow Cell Line | Bone Marrow Cell | Bone Marrow | Cell Line | | Uni-ZAP XR | |
| | (RS4;11) | Line RS4;11 | | | | | |
| H0342 | Lingual Cyrus | Lingual Cyrus | Brain | | | Uni-Zap XR | |
| H0343 | stomach cancer (human) | Stomach Cancer - | | | disease | Uni-ZAP XR | |
| | | 5383A (human) | | | | | |
| H0344 | Adipose tissue (human) | Adipose - 6825A | | | | Uni-ZAP XR | |
| | | (human) | | | | | |
| H0351 | Glioblastoma | Glioblastoma | Brain | | disease | Uni-ZAP XR | |
| H0352 | wilm's tumor | Wilm's Tumor | | | disease | Uni-ZAP XR | |
| H0355 | Human Liver | Human Liver, | | | | pCMVSport 1 | |
| | | normal Adult | | | | | |
| H0356 | Human Kidney | Human Kidney | Kidney | | | pCMVSport 1 | |
| H0361 | Human rejected kidney | Human Rejected | disease | pBluescript | | | |
| | | Kidney | | | | | |
| H0369 | H. Atrophic | Atrophic | | | | Uni-ZAP XR | |
| | Endometrium | Endometrium and | | | | | |
| | | myometrium | | | | | |
| H0370 | H. Lymph node breast | Lymph node with | | | disease | Uni-ZAP XR | |
| | Cancer | Met. Breast Cancer | | | | | |
| H0373 | Human Heart | Human Adult Heart | Heart | | | pCMVSport 1 | |
| H0375 | Human Lung | Human Lung | | | | pCMVSport 1 | |
| H0381 | Bone Cancer | Bone Cancer | | | disease | Uni-ZAP XR | |
| H0390 | Human Amygdala | Human Amygdala | | | disease | pBluescript | |
| | Depression, re-excision | Depression | | | | | |
| H0392 | H. Meningima, M1 | Human Meningima | brain | | | pSport1 | |
| H0393 | Fetal Liver, subtraction | Human Fetal Liver | Liver | | | pBluescript | |
| | II | | | | | | |
| H0400 | Human Striatum | Human Brain, | Brain | | | Lambda ZAP II | |
| | Depression, re-rescue | Striatum Depression | | | | | |
| H0402 | CD34 depleted Buffy | CD34 Depleted | Cord Blood | | | ZAP Express | |
| | Coat (Cord Blood), re- | Buffy Coat (Cord | | | | | |
| | excision | Blood) | | | | | |
| H0411 | H Female Bladder, | Human Female | Bladder | | | pSport1 | |
| | Adult | Adult Bladder | | | | | |
| H0412 | Human umbilical vein | HUVE Cells | Umbilical | Cell Line | | pSport1 | |
| | endothelial cells, IL-4 | | vein | | | | |
| | induced | | | | | | |
| H0413 | Human Umbilical Vein | HUVE Cells | Umbilical | Cell Line | | pSport1 | |
| | Endothelial Cells, | | vein | | | | |
| | uninduced | | | | | | |
| H0414 | Ovarian Tumor I, | Ovarian Tumor, | Ovary | | disease | pSport1 | |
| | OV5232 | OV5232 | | | | | |
| H0415 | H. Ovarian Tumor, II, | Ovarian Tumor, | Ovary | | disease | pCMVSport 2.0 | |
| | OV5232 | OV5232 | | | | | |
| H0416 | Human Neutrophils, | Human Neutrophil - | Blood | Cell Line | | pBluescript | |
| | Activated, re-excision | Activated | | | | | |
| H0418 | Human Pituitary, | Human Pituitary | | | | pBluescript | |
| | subtracted VII | | | | | | |
| H0421 | Human Bone Marrow, | Bone Marrow | | | | pBluescript | |
| | re-excision | | | | | | |
| H0422 | T-Cell PHA 16 hrs | T-Cells | Blood | Cell Line | | pSport1 | |
| H0423 | T-Cell PHA 24 hrs | T-Cells | Blood | Cell Line | | pSport1 | |
| H0424 | Human Pituitary, subt | Human Pituitary | | | | pBluescript | |
| | IX | | | | | | |
| H0427 | Human Adipose | Human Adipose, left | | | | pSport1 | |
| | | hiplipoma | | | | | |
| H0428 | Human Ovary | Human Ovary | Ovary | | | pSport1 | |
| | | Tumor | | | | | |
| H0429 | K562 + PMA (36 | K562 Cell line | cell line | Cell Line | | ZAP Express | |
| | hrs), re-excision | | | | | | |
| H0431 | H. Kidney Medulla, re- | Kidney medulla | Kidney | | | pBluescript | |
| | excision | | | | | | |
| H0435 | Ovarian Tumor 10-3-95 | Ovarian Tumor, | Ovary | | | pCMVSport 2.0 | |
| | | OV350721 | | | | | |
| H0436 | Resting T-Cell | T-Cells | Blood | Cell Line | | pSport1 | |
| | Library, II | | | | | | |
| H0437 | H Umbilical Vein | HUVE Cells | Umbilical | Cell Line | | Lambda ZAP II | |
| | Endothelial Cells, frac | | vein | | | | |
| | A, re-excision | | | | | | |
| H0438 | H. Whole Brain #2, re- | Human Whole Brain | | | | ZAP Express | |
| | excision | #2 | | | | | |
| H0441 | H. Kidney Cortex, | Kidney cortex | Kidney | | | pBluescript | |
| | subtracted | | | | | | |
| H0442 | H. Striatum Depression, | Human Brain, | Brain | | | pBluescript | |
| | subt II | Striatum Depression | | | | | |
| H0444 | Spleen metastic | Spleen, Metastic | Spleen | | disease | pSport1 | |
| | melanoma | malignant | | | | | |
| | | melanoma | | | | | |
| H0445 | Spleen, Chronic | Human Spleen, CLL | Spleen | | disease | pSport1 | |
| | lymphocytic leukemia | | | | | | |
| H0455 | H. Striatum Depression, | Human Brain, | Brain | | | pBluescript | |
| | subt Striatum Depression | | | | | | |
| H0457 | Human Eosinophils | Human Eosinophils | | | | pSport1 | |
| H0477 | Human Tonsil, Lib 3 | Human Tonsil | Tonsil | | | pSport1 | |
| H0478 | Salivary Gland, Lib 2 | Human Salivary | Salivary | | | pSport1 | |
| | Gland | gland | | | | | |
| H0483 | Breast Cancer cell line, | Breast Cancer Cell | | | | pSport1 | |
| | MDA 36 | line, MDA 36 | | | | | |
| H0484 | Breast Cancer Cell line, | Breast Cancer Cell | | | | pSport1 | |
| | angiogenic | line, Angiogenic, | | | | | |
| | | 36T3 | | | | | |
| H0485 | Hodgkin's Lymphoma I | Hodgkin's | | | disease | pCMVSport 2.0 | |
| | Lymphoma I | | | | | | |
| H0486 | Hodgkin's Lymphoma | Hodgkin's | | | disease | pCMVSport 2.0 | |
| | II | Lymphoma II | | | | | |
| H0487 | Human Tonsils, lib I | Human Tonsils | | | | pCMVSport 2.0 | |
| H0485 | Human Tonsils, Lib 2 | Human Tonsils | | | | pCMVSport 2.0 | |
| H0494 | Keratinocyte | Keratinocyte | | | | pCMVSport 2.0 | |
| H0497 | HEL cell line | HEL cell line | | HEL | | pSport1 | |
| | | | | 92.1.7 | | | |
| H0505 | Human Astrocyte | Human Astrocyte | | | | pSport1 | |
| H0506 | Ulcerative Colitis | Colon | Colon | | | pSport1 | |
| H0509 | Liver, Hepatoma | Human Liver, | Liver | | disease | pCMVSport 3.0 | |
| | | Hepatoma, patient 8 | | | | | |
| H0510 | Human Liver, normal | Human Liver, | Liver | | | pCMVSport 3.0 | |
| | | normal, Patient #8 | | | | | |
| H0517 | Nasal pulyps | Nasal polyps | | | | pCMVSport 2.0 | |
| H0518 | pBMC stimulated w/ | pBMC stimulated | | | | pCMVSport 3.0 | |
| | poly I/C | with poly I/C | | | | | |
| H0519 | NTERA2, control | NTERA2, | | | | pCMVSport 3.0 | |
| | | Teratocarcinoma | | | | | |
| | | cell line | | | | | |
| H0520 | NTERA2 + retinoic | NTERA2, | | | | pSport1 | |
| | acid, 14 days | Teratocarcinoma | | | | | |
| | | cell line | | | | | |
| H0521 | Pnmary Dendritic Cells, | Primary Dendritic | | | | pCMVSport 3.0 | |
| | lib I | cells | | | | | |
| H0522 | Primary Dendritic | Primary Dendritic | | | | pCMVSport 3.0 | |
| | cells,frac 2 | cells | | | | | |
| H0528 | Poly[I]/Poly[C] Normal | Poly[I]/Poly[C] | | | | pCMVSport 3.0 | |
| | Lung Fibroblasts | Normal Lung | | | | | |
| | | Fibroblasts | | | | | |
| H0529 | Myoloid Progenitor Cell | TF-1 Cell Line; | | | | pCMVSport 3.0 | |
| | Line | Myoloid progenitor | | | | | |
| | | cell line | | | | | |
| H0530 | Human Dermal | Human Dermal | | | | pSport1 | |
| | Endothelial | Endothelial Cells; | | | | | |
| | Cells, untreated | untreated | | | | | |
| H0535 | Human ovary tumor cell | Ovarian Tumor, | Ovary | | disease | pSport1 | |
| | OV350721 | OV350721 | | | | | |
| H0538 | Merkel Cells | Merkel cells | Lymph node | | | pSport1 | |
| H0539 | Pancreas Islet Cell | Pancreas Islet Cell | Pancreas | | disease | pSport1 | |
| | Tumor | Tumour | | | | | |
| H0542 | T Cell helper I | Helper T cell | | | | pCMVSport 3.0 | |
| H0543 | T cell helper II | Helper T cell | | | | pCMVSport 3.0 | |
| H0544 | Human endometrial | Human endometrial | | | | pCMVSport 3.0 | |
| | stromal cells | stromal cells | | | | | |
| H0545 | Human endometrial | Human endometrial | | | | pCMVSport 3.0 | |
| | stromal cells-treated | stromal cells-treated | | | | | |
| | with progesterone | with proge | | | | | |
| H0546 | Human endometrial | Human endometrial | | | | pCMVSport 3.0 | |
| | stromal cells-treated | stromal cells-treated | | | | | |
| | with estradiol | with estra | | | | | |
| H0547 | NTERA2 | NTERA2, | | | | pSport1 | |
| | teratocarcinoma cell | Teratocarcinoma | | | | | |
| | line + retinoic acid (14 | cell line | | | | | |
| | days) | | | | | | |
| H0549 | H. Epididiymus, caput | Human | | | | Uni-ZAP XR | |
| | & corpus | Epididiymus, caput | | | | | |
| | | and corpus | | | | | |
| H0550 | H. Epididiymus, cauda | Human | | | | Uni-ZAP XR | |
| | | Epididiymus, cauda | | | | | |
| H0551 | Human Thymus Stromal | Human Thymus | | | | pCMVSport 3.0 | |
| | Cells | Stromal Cells | | | | | |
| H0552 | Signal trap, Femur Bone | Femur Bone | | | | Other | |
| | Marrow, pooled | marrow, pooled | | | | | |
| | | from 8 male/female | | | | | |
| H0553 | Human Placenta | Human Placenta | | | | pCMVSport 3.0 | |
| H0555 | Rejected Kidney, lib 4 | Human Rejected | Kidney | | disease | pCMVSport 3.0 | |
| | | Kidney | | | | | |
| H0556 | Activated T- | T-Cells | Blood | Cell Line | | Uni-ZAP XR | |
| | cell(12 h)/Thiouridine- | | | | | | |
| | re-excision | | | | | | |
| H0560 | KMH2 | KMH2 | | | | pCMVSport 3.0 | |
| H0561 | L428 | L428 | | | | pCMVSport 3.0 | |
| H0562 | Human Fetal Brain, | Human Fetal Brain | | | | pCMVSport 2.0 | |
| | normalized c5-11-26 | | | | | | |
| H0565 | HUman Fetal Brain, | Human Fetal Brain | | | | pCMVSport 2.0 | |
| | normalized 100024F | | | | | | |
| H0570 | Human Fetal Brain, | Human Fetal Brain | | | | pCMVSport 2.0 | |
| | normalized C500H | | | | | | |
| H0571 | Human Fetal Brain, | Human Fetal Brain | | | | pCMVSport 2.0 | |
| | normalized C500HE | | | | | | |
| H0574 | Hepatocellular Tumor; | Hepatocellular | Liver | | disease | Lambda ZAP II | |
| | re-excision | Tumor | | | | | |
| H0575 | Human Adult | Human Adult Lung | | | Uni-ZAP XR | | |
| | Pulmonary; re-excision | Pulmonary | | | | | |
| H0576 | Resting T-Cell; re- | T-Cells | Blood | Cell Line | | Lambda ZAP II | |
| | excision | | | | | | |
| H0580 | Dendritic cells, pooled | Pooled dendritic | | | | pCMVSport 3.0 | |
| | | cells | | | | | |
| H0581 | Human Bone Marrow, | Human Bone | Bone Marrow | | | pCMVSport 3.0 | |
| | treated | Marrow | | | | | |
| H0583 | B Cell lymphoma | B Cell Lymphoma | B Cell | | disease | pCMVSport 3.0 | |
| H0585 | Activated T-Cells, 12 | Activated T-Cells | Blood | Cell Line | | Uni-ZAP XR | |
| | hrs, re-excision | | | | | | |
| H0586 | Healing groin wound, | healing groin | groin | | disease | pCMVSport 3.0 | |
| | 6.5 hours post incision | wound, 6.5 hours | | | | | |
| | | post incision-2/ | | | | | |
| H0587 | Healing groin wound; | Groin-2/19/97 | groin | | disease | pCMVSport 3.0 | |
| | 7.5 hours post incision | | | | | | |
| H0590 | Human adult small | Human Adult Small | Small Int. | | | Uni-ZAP XR | |
| | intestine,re-excision | Intestine | | | | | |
| H0591 | Human T-cell | T-Cell Lymphoma | T-Cell | | disease | Uni-ZAP XR | |
| | lymphoma; re-excision | | | | | | |
| H0592 | Healing groin wound - | HGS wound healing | | | disease | pCMVSport 3.0 | |
| | zero hr post-incision | project; abdomen | | | | | |
| | (control) | | | | | | |
| H0593 | Olfactory | Olfactory epithelium | | | | pCMVSport 3.0 | |
| | epithelium; nasal cavity | from roof of left | | | | | |
| | | nasal cacit | | | | | |
| H0594 | Human Lung Cancer; re- | Human Lung Cancer | Lung | | disease | Lambda ZAP II | |
| | excision | | | | | | |
| H0595 | Stomach cancer | Stomach Cancer - | | | disease | Uni-ZAP XR | |
| | (human);re-excision | 5353A (human) | | | | | |
| H0596 | Human Colon | Human Colon | Colon | | | Lambda ZAP II | |
| | Cancer; re-excision | Cancer | | | | | |
| H0597 | Human Colon; re- | Human Colon | | | | Lambda ZAP II | |
| | excision | | | | | | |
| H0598 | Human Stomach; re- | Human Stomach | Stomach | | | Uni-ZAP XR | |
| | excision | | | | | | |
| H0599 | Human Adult Heart; re- | Human Adult Heart | Heart | | | Uni-ZAP XR | |
| | excision | | | | | | |
| H0600 | Healing Abdomen | Abdomen | | | disease | pCMVSport 3.0 | |
| | wound; 70 & 90 mm post | | | | | | |
| | incision | | | | | | |
| H0604 | Human Pituitary, re- | Human Pituitary | | | | pBluescnpt | |
| | excision | | | | | | |
| H0606 | Human Primary Breast | Human Primary | Breast | | disease | Uni-ZAP XR | |
| | Cancer; re-excision | Breast Cancer | | | | | |
| H0609 | H. Leukocytes, | H. Leukocytes | | | | pCMVSport 1 | |
| | normalized cot > 500A | | | | | | |
| H0614 | H. Leukocytes, | H. Leukocytes | | | | pCMVSport 1 | |
| | normalized cot 500 A | | | | | | |
| H0615 | Human Ovarian Cancer | Ovarian Cancer | Ovary | | disease | Uni-ZAP XR | |
| | Reexcision | | | | | | |
| H0616 | Human Testes, | Human Testes | Testis | | | Uni-ZAP XR | |
| | Reexcision | | | | | | |
| H0617 | Human Primary Breast | Human Primary | Breast | | disease | Uni -ZAP XR | |
| | Cancer Reexcision | Breast Cancer | | | | | |
| H0618 | Human Adult Testes, | Human Adult Testis | Testis | | | Uni-ZAP XR | |
| | Large Inserts, | | | | | | |
| | Reexcision | | | | | | |
| H0619 | Fetal Heart | Human Fetal Heart | Heart | | | Uni-ZAP XR | |
| H0620 | Human Fetal Kidney; | Human Fetal Kidney | Kidney | | | Uni-ZAP XR | |
| | Reexcision | | | | | | |
| H0622 | Human Pancreas Tumor; | Human Pancreas | Pancreas | | disease | Uni-ZAP XR | |
| | Reexcision | Tumor | | | | | |
| H0623 | Human Umbilical Vein; | Human Umbilical | Umbilical | | | Uni-ZAP XR | |
| | Reexcision | Vein Endothelial | vein | | | | |
| | | Cells | | | | | |
| H0624 | 12 Week Early Stage | Twelve Week Old | Embryo | | | Uni-ZAP XR | |
| | Human II; Reexcision | Early Stage Human | | | | | |
| H0625 | Ku 812F Basophils Line | Ku 812F Basophils | | | | pSport1 | |
| H0626 | Saos2 Cells; Untreated | Saos2 Cell Line; | | | | pSport1 | |
| | | Untreated | | | | | |
| H0628 | Human Pre- | Human Pre- | | | | Uni-ZAP XR | |
| | Differentiated | Differentiated | | | | | |
| | Adipocytes | Adipocytes | | | | | |
| H0632 | Hepatocellular | Hepatocellular | Liver | | | Lambda ZAP II | |
| | Tumor; re-excision | Tumor | | | | | |
| H0633 | Lung Carcinoma A549 | TNFalpha activated | | | disease | pSport1 | |
| | TNFalpha activated | A549-Lung | | | | | |
| | | Carcinoma | | | | | |
| H0634 | Human Testes Tumor, | Human Testes | Testis | | disease | Uni-ZAP XR | |
| | re-excision | Tumor | | | | | |
| H0635 | Human Activated T- | Activated T-Cells | Blood | Cell Line | | Uni-ZAP XR | |
| | Cells, re-excision | | | | | | |
| H0637 | Dendritic Cells From | Dentritic cells from | | | | pSport1 | |
| | CD34 Cells | CD34 cells | | | | | |
| H0638 CD40 activated | CD40 activated | | | | pSport1 | | |
| | monocyte dendridic | monocyte dendridic | | | | | |
| | cells | cells | | | | | |
| H0639 | Ficolled Human Stromal | Ficolled Human | | | | Other | |
| | Cells, 5Fu treated | Stromal Cells, 5Fu | | | | | |
| | | treated | | | | | |
| H0641 | LPS activated derived | LPS activated | | | | pSport1 | |
| | dendritic cells | monocyte derived | | | | | |
| | | dendritic cells | | | | | |
| H0642 | Hep G2 Cells, lambda | Hep G2 Cells | | | | Other | |
| | library | | | | | | |
| H0643 | Hep G2 Cells, PCR | Hep G2 Cells | | | | Other | |
| | library | | | | | | |
| H0644 | Human Placenta (re- | Human Placenta | Placenta | | | Uni-ZAP XR | |
| | excision) | | | | | | |
| H0645 | Fetal Heart, re-excision | Human Fetal Heart | Heart | | | Uni-ZAP XR | |
| H0646 | Lung, Cancer (4005313 | Metastatic | | | | pSport1 | |
| | A3): Invasive Poorly | squamous cell lung | | | | | |
| | Differentiated Lung | carcinoma, poorly di | | | | | |
| | Adenocarcinoma, | | | | | | |
| H0647 | Lung, Cancer (4005163 | Invasive poorly | | | disease | pSport1 | |
| | B7): Invasive, Poorly | differentiated lung | | | | | |
| | Diff. Adenocarcinoma, | adenocarcinoma | | | | | |
| | Metastatic | | | | | | |
| H0648 | Ovary, Cancer: | Papillary Cstic | | | disease | pSport1 | |
| | (4004562 B6) Papillary | neoplasm of low | | | | | |
| | Serous Cystic | malignant potentia | | | | | |
| | Neoplasm, Low | | | | | | |
| | Malignant Pot | | | | | | |
| H0649 | Lung, Normal: | Normal Lung | | | | pSport1 | |
| | (4005313 B1) | | | | | | |
| H0650 | B-Cells | B-Cells | | | pCMVSport 30 | | |
| H0651 | Ovary, Normal: | Normal Ovary | | | | pSport1 | |
| | (9805C040R) | | | | | | |
| H0652 | Lung, Normal: | Normal Lung | | | | pSport1 | |
| | (4005313 B1) | | | | | | |
| H0653 | Stromal Cells | Stromal Cells | | | | pSport1 | |
| H0654 | Lung, Cancer: (4005313 | Metastatic | | | | Other | |
| | A3) Invasive Poorly- | Squamous cell lung | | | | | |
| | differentiated Metastatic | Carcinoma poorly | | | | | |
| | lung adenoc | dif | | | | | |
| H0656 | B-cells (unstimulated) | B-cells | | | | pSport1 | |
| | | (unstimulated) | | | | | |
| H0657 | B-cells (stimulated) | B-cells (stimulated) | | | | pSport1 | |
| H0658 | Ovary, Cancer | 9809C332 - Poorly | Ovary & | | disease | pSport1 | |
| | (9809C332): Poorly | differentiate | Fallopian | | | | |
| | differentiated | | Tubes | | | | |
| | adenocarcinoma | | | | | | |
| H0659 | Ovary, Cancer | Grade II Papillary | Ovary | | disease | pSport1 | |
| | (15395AIF): Grade II | Carcinoma, Ovary | | | | | |
| | Papillary Carcinoma | | | | | | |
| H0660 | Ovary, Cancer: | Poorly differentiated | | | disease | pSport1 | |
| | (15799AIF) Poorly | carcinoma, ovary | | | | | |
| | differentiated carcinoma | | | | | | |
| H0661 | Breast, Cancer: | Breast cancer | | | disease | pSport1 | |
| | (4004943 A5) | | | | | | |
| H0662 | Breast, Normal: | Normal Breast - | Breast | | | pSport1 | |
| | (4005522 B2) | #4005522(B2) | | | | | |
| H0663 | Breast, Cancer: | Breast Cancer - | Breast | | disease | pSport1 | |
| | (4005522 A2) | #4005522(A2) | | | | | |
| H0665 | Stromal cells 3.88 | Stromal cells 3.88 | | | | pSport1 | |
| H0666 | Ovary, Cancer: | Ovarian Cancer, | | | disease | pSport1 | |
| | (4004332 A2) | Sample | | | | | |
| | | #4004332A2 | | | | | |
| H0667 | Stromal cells(HBM3.18) | Stromal cell(HBM | | | | pSport1 | |
| | | 3.18) | | | | | |
| H0670 | Ovary, Cancer(4004650 | Ovarian Cancer - | | | | pSport1 | |
| | A3): Well- | 4004650A3 | | | | | |
| | Differentiated | | | | | | |
| | Micropapillary Serous | | | | | | |
| | Carcinoma | | | | | | |
| H0672 | Ovary, Cancer: | Ovarian | Ovary | | | pSport1 | |
| | (4004576 A8) | Cancer(4004576 A8) | | | | | |
| H0673 | Human Prostate Cancer, | Human Prostate | Prostate | | | Uni-ZAP XR | |
| | Stage B2; re-excision | Cancer, stage B2 | | | | | |
| H0674 | Human Prostate Cancer, | Human Prostate | Prostate | | | Uni-ZAP XR | |
| | Stage C; re-excission | Cancer, stage C | | | | | |
| H0675 | Colon, Cancer: | Colon Cancer | | | | pCMVSport 3.0 | |
| | (9808C064R) | 9808C064R | | | | | |
| H0676 | Colon, Cancer: | Colon Cancer | | | | pCMVSport 3.0 | |
| | (9808C064R)-total RNA | 9808C064R | | | | | |
| H0677 | TNFR degenerate oligo | B-Cells | | | | PCRII | |
| H0679 | screened clones from | Human Tonsils | | | | Other | |
| | Tonsil library | | | | | | |
| H0682 | Serous Papillary | serous papillary | | | | pCMVSport 3.0 | |
| | Adenocarcinoma | adenocarcinoma | | | | | |
| | | (9606G304SPA3B) | | | | | |
| H0684 | Serous Papillary | Ovarian Cancer- | Ovaries | | | pCMVSport 3.0 | |
| | Adenocarcinoma | 9810G606 | | | | | |
| H0685 | Adenocarcinoma of | Adenocarcinoma of | | | | pCMVSport 3.0 | |
| | Ovary, Human Cell | Ovary, Human Cell | | | | | |
| | Line, #OVCAR-3 | Line, #OVCAR- | | | | | |
| H0686 | Adenocarcinoma of | Adenocarcinoma of | | | | pCMVSport 3.0 | |
| | Ovary, Human Cell Line | Ovary, Human Cell | | | | | |
| | | Line, #SW-626 | | | | | |
| H0687 | Human normal | Human normal | Ovary | | | pCMVSport 3.0 | |
| | ovary(#9610G215) | ovary(#9610G215) | | | | | |
| H0688 | Human Ovarian | Human Ovarian | | | | pCMVSport 3.0 | |
| | Cancer(#9807G017) | cancer(#9807G017), | | | | | |
| | | mRNA from Maura | | | | | |
| | | Ru | | | | | |
| H0689 | Ovarian Cancer | Ovarian Cancer, | | | | pCMVSport 3.0 | |
| | | #9806G019 | | | | | |
| H0690 | Ovarian Cancer, | Ovarian Cancer, | | | | pCMVSport 3.0 | |
| | #9702G001 | #9702G001 | | | | | |
| H0692 | BLyS Receptor from | B Cell Lymphoma | B Cell | | | pCMVSport 3.0 | |
| | Expression Cloning | | | | | | |
| H0693 | Normal Prostate | Normal Prostate | | | | pCMVSport 3.0 | |
| | #0DQ3958EN | Tissue # | | | | | |
| | | 0DQ3958EN | | | | | |
| H0694 | Prostate gland | Prostate gland, | prostate | | | pCMVSport 3.0 | |
| | adenocarcinoma | adenocarcinoma, | gland | | | | |
| | | mod/diff gleason | | | | | |
| N0006 | Human Fetal Brain | Human Fetal Brain | | | | | |
| S0001 | Brain frontal cortex | Brain frontal cortex | Brain | | | Lambda ZAP II | |
| S0002 | Monocyte activated | Monocyte-activated | blood | Cell Line | | Uni-ZAP XR | |
| S0003 | Human Osteoclastoma | Osteoclastoma | bone | | disease | Uni-ZAP XR | |
| S0007 | Early Stage Human | Human Fetal Brain | | | | Uni-ZAP XR | |
| | Brain | | | | | | |
| S0010 | Human Amygdala | Amygdala | | | | Uni-ZAP XR | |
| S0011l | STROMAL - | Osteoclastoma | bone | | disease | Uni-ZAP XR | |
| | OSTEOCLASTOMA | | | | | | |
| S0013 | Prostate | Prostate | prostate | | | Uni-ZAP XR | |
| S0016 | Kidney Pyramids | Kidney pyramids | Kidney | | | Uni-ZAP XR | |
| S0022 | Human Osteoclastoma | Osteoclastoma | | | | Uni-ZAP XR | |
| | Stromal Cells - | Stromal Cells | | | | | |
| | unamplified | | | | | | |
| S0026 | Stromal cell TF274 | stromal cell | Bone marrow | Cell Line | | Uni-ZAP XR | |
| S0027 | Smooth muscle, serum | Smooth muscle | Pulmanary | Cell Line | | Uni-ZAP XR | |
| | treated | | artery | | | | |
| S0028 | Smooth muscle, control | Smooth muscle | Pulmanary | Cell Line | | Uni-ZAP XR | |
| | | | artery | | | | |
| S0029 | brain stem | Brain stem | brain | | | Uni-ZAP XR | |
| S0031 | Spinal cord | Spinal cord | spinal cord | | | Uni-ZAP XR | |
| S0032 | Smooth muscle-ILb | Smooth muscle | Pulmanary | Cell Line | | Uni-ZAP XR | |
| | induced | | artery | | | | |
| S0036 | Human Substantia Nigra | Human Substantia | | | | Uni-ZAP XR | |
| | | Nigra | | | | | |
| S0037 | Smooth muscle, IL1b | Smooth muscle | Pulmanary | Cell Line | Uni-ZAP XR | | |
| | induced | | artery | | | | |
| S0038 | Human Whole Brain #2 - | Human Whole Brain | | | | ZAP Express | |
| | Oligo dT > 1.5 Kb | #2 | | | | | |
| S0040 | Adipocytes | Human Adipocytes | | | | Uni-ZAP XR | |
| | | from Osteoclastoma | | | | | |
| S0042 | Testes | Human Testes | | | | ZAP Express | |
| S0044 | Prostate BPH | prostate BPH | Prostate | | disease | Uni-ZAP XR | |
| S0045 | Endothelial cells-control | Endothelial cell | endothelial | Cell Line | | Uni-ZAP XR | |
| | | | cell-lung | | | | |
| S0046 | Endothelial-induced | Endothelial cell | endothelial | Cell Line | | Uni-ZAP XR | |
| | | | cell-lung | | | | |
| S0049 | Human Brain, Striatum | Human Brain, | | | | Uni-ZAP XR | |
| | | Striatum | | | | | |
| S0050 | Human Frontal Cortex, | Human Frontal | | | disease | Uni-ZAP XR | |
| | Schizophrenia | Cortex, | | | | | |
| | | Schizophrenia | | | | | |
| S0051 | Human | Human | | | disease | Uni-ZAP XR | |
| | Hypothalmus, Schizophrenia | Hypothalamus, | | | | | |
| | | Schizophrenia | | | | | |
| S0052 | neutrophils control | human neutrophils | blood | Cell Line | | Uni-ZAP XR | |
| S0053 | Neutrophils IL-1 and | human neutrophil | blood | Cell Line | | Uni-ZAP XR | |
| | LPS induced | induced | | | | | |
| S0106 | STRIATUM | | BRAIN | | disease | Uni-ZAP XR | |
| | DEPRESSION | | | | | | |
| S0112 | Hypothalamus | | Brain | | | Uni-ZAP XR | |
| S0114 | Anergic T-cell | Anergic T-cell | | Cell Line | | Uni-ZAP XR | |
| S0116 | Bone marrow | Bone marrow | Bone marrow | | | Uni-ZAP XR | |
| S0126 | Osteoblasts | Osteoblasts | Knee | Cell Line | | Uni-ZAP XR | |
| S0132 | Epithelial-TNFa and | Airway Epithelial | | | | Uni-ZAP XR | |
| | INF induced | | | | | | |
| S0134 | Apoptotic T-cell | apoptotic cells | | Cell Line | | Uni-ZAP XR | |
| S0142 | Macrophage-oxLDL | macrophage- | blood | Cell Line | | Uni-ZAP XR | |
| | | oxidized LDL | | | | | |
| | treated | | | | | | |
| S0144 | Macrophage (GM-CSF | Macrophage (GM- | | | | Uni-ZAP XR | |
| | treated) | CSF treated) | | | | | |
| S0146 | prostate-edited | prostate BPH | Prostate | | | Uni-ZAP XR | |
| S0148 | Normal Prostate | Prostate | prostate | | | Uni-ZAP XR | |
| S0150 | LNCAP prostate cell | LNCAP Cell Line | Prostate | Cell Line | | Uni-ZAP XR | |
| | line | | | | | | |
| S0152 | PC3 Prostate cell line | PC3 prostate cell | | | | Uni-ZAP XR | |
| | | line | | | | | |
| S0168 | Prostate/LNCAP, PC3 prostate cell | | | | pBluescript | | |
| | subtraction I | line | | | | | |
| S0190 | Prostate BPH, Lib 2, | Human Prostate | | | | pSport1 | |
| | subtracted | BPH | | | | | |
| S0192 | Synovial Fibroblasts | Synovial Fibroblasts | | | | pSport1 | |
| | (control) | | | | | | |
| S0194 | Synovial hypoxia | Synovial Fibroblasts | | | | pSport1 | |
| S0196 | Synovial IL-1/TNF | Synovial Fibroblasts | | | | pSport1 | |
| | stimulated | | | | | | |
| S0202 | 7TM-pbdd | PBLS, 7TM | | | | PCRII | |
| | | receptor enriched | | | | | |
| S0206 | Smooth Muscle- | Smooth muscle | Pulmanary | Cell Line | | pBluescript | |
| | HASTE normalized | | artery | | | | |
| S0208 | Messangial cell, frac 1 | Messangial cell | | | | pSport1 | |
| S0210 | Messangial cell, frac 2 | Messangial cell | | | | pSport1 | |
| S0212 | Bone Marrow Stromal | Bone Marrow | | | | pSport1 | |
| | Cell, untreated | Stromal | | | | | |
| | | Cell, untreated | | | | | |
| S0214 | Human Osteoclastoma, | Osteoclastoma | bone | | disease | Uni-ZAP XR | |
| | re-excision | | | | | | |
| S0216 | Neutropbils IL-1 and | human neutrophil | blood | Cell Line | | Uni-ZAP XR | |
| | LPS induced | induced | | | | | |
| S0222 | H. Frontal | H. Brain, Frontal | Brain | | disease | Uni-ZAP XR | |
| | cortex, epileptic; re- | Cortex, Epileptic | | | | | |
| | excision | | | | | | |
| S0242 | Synovial Fibroblasts | Synovial Fibroblasts | | | | pSport1 | |
| | (Il1/TNF), subt | | | | | | |
| S0250 | Human Osteoblasts II | Human Osteoblasts | Femur | | disease | pCMVSport 2.0 | |
| S0260 | Spinal Cord, re-excision | Spinal cord | spinal cord | | | Uni-ZAP XR | |
| S0276 | Synovial hypoxia-RSF | Synovial fobroblasts | Synovial | | | pSport I | |
| | subtracted | (rheumatoid) | tissue | | | | |
| S0278 | H Macrophage (GM- | Macrophage (GM- | | | | Uni-ZAP XR | |
| | CSF treated), re- | CSF treated) | | | | | |
| | excision | | | | | | |
| S0280 | Human Adipose Tissue, | Human Adipose | | | | Uni-ZAP XR | |
| | re-excision | Tissue | | | | | |
| S0282 | Brain Frontal Cortex, re- | Brain frontal cortex | Brain | | | Lambda ZAP II | |
| | excision | | | | | | |
| S0298 | Bone marrow | Bone marrow | Bone marrow | | | pSport1 | |
| | stroma,treated | stroma, treated SB | | | | | |
| S0308 | Spleen/normal | Spleen normal | | | | pSport1 | |
| S0310 | Normal trachea | Normal trachea | | | | pSport1 | |
| S0312 | Human | Human | | | disease | pSport1 | |
| | osteoarthritic; fraction II | osteoarthritic | | | | | |
| | | cartilage | | | | | |
| S0314 | Human | Human | | | disease | pSport1 | |
| | osteoarthritis; fraction I | osteoarthritic | | | | | |
| | | cartilage | | | | | |
| S0316 | Human Normal | Human Normal | | | | pSport1 | |
| | Cartilage, Fraction I | Cartilage | | | | | |
| S0328 | Palate carcinoma | Palate carcinoma | Uvula | | disease | pSport1 | |
| S0330 | Palate normal | Palate normal | Uvula | | | pSport1 | |
| S0342 | Adipocytes; re-excision | Human Adipocytes | | | | Uni-ZAP XR | |
| | | from Osteoclastoma | | | | | |
| S0344 | Macrophage-oxLDL; re- | macrophage- | blood | Cell Line | | Uni-ZAP XR | |
| | excision | oxidized LDL | | | | | |
| | | treated | | | | | |
| S0346 | Human Amygdala; re- | Amygdala | | | | Uni-ZAP XR | |
| | excision | | | | | | |
| S0352 | Larynx Carcinoma | Larynx carcinoma | | | disease | pSport1 | |
| S0354 | Colon Normal II | Colon Normal | Colon | | | pSport1 | |
| S0356 | Colon Carcinoma | Colon Carcinoma | Colon | | disease | pSport1 | |
| S0358 | Colon Normal III | Colon Normal | Colon | | | pSport1 | |
| S0360 | Colon Tumor II | Colon Tumor | Colon | | disease | pSport1 | |
| S0364 | Human Quadriceps | Quadriceps muscle | | | pSport1 | | |
| S0366 | Human Soleus | Soleus Muscle | | | | pSport1 | |
| S0374 | Normal colon | Normal colon | | | | pSport1 | |
| S0376 | Colon Tumor | Colon Tumor | | | disease | pSport1 | |
| S0378 | Pancreas normal PCA4 | Pancreas Normal | | | | pSport1 | |
| | No | PCA4 No | | | | | |
| S0380 | Pancreas Tumor PCA4 | Pancreas Tumor | | | disease | pSport1 | |
| | Tu | PCA4 Tu | | | | | |
| S0382 | Larynx carcinoma IV | Larynx carcinoma | | | disease | pSport1 | |
| S0386 | Human Whole Brain, re- | Whole brain | Brain | | | ZAP Express | |
| | excision | | | | | | |
| S0388 | Human | Human | | | disease | Uni-ZAP XR | |
| | Hypothalamus, schizophrenia, | Hypothalamus, | | | | | |
| | re-excision | Schizophrenia | | | | | |
| S0390 | Smooth muscle, control; | Smooth muscle | Pulmanary | Cell Line | | Uni-ZAP XR | |
| | re-excision | | artery | | | | |
| S0402 | Adrenal Gland, normal | Adrenal gland; | | | | pSport1 | |
| | | normal | | | | | |
| S0406 | Rectum tumour | Rectum tumour | | | | pSport1 | |
| S0410 | Colon, tumour | Colon, tumour | | | | pSport1 | |
| S0414 | Hippocampus, | Hippocampus, | | | | Other | |
| | Alzheimer Subtracted | Alzheimer | | | | | |
| | | Subtracted | | | | | |
| S0418 | CHME Cell Line; treated | CHME Cell Line; | | | | pCMVSport 3.0 | |
| | 5 hrs | treated | | | | | |
| S0420 | CHME Cell | CHME Cell line, | | | | pSport1 | |
| | Line, untreated | untreated | | | | | |
| S0422 | Mo7e Cell Line GM- | Mo7e Cell Line | | | | pCMVSport 3.0 | |
| | CSF treated (2 ng/ml) | GM-CSF treated | | | | | |
| | | (1 ng/ml) | | | | | |
| S0424 | TF-2 Cell Line GM-CSF | TF-1 Cell Line | | | | pSport1 | |
| | Treated | GM-CSP Treated | | | | | |
| S0426 | Monocyte activated; re-Monocyte-activated | blood | Cell Line | | Uni-ZAP XR | | |
| | excision | | | | | | |
| S0428 | Neutrophils control; re-human neutrophils | blood | Cell Line | | Uni-ZAP XR | | |
| | excision | | | | | | |
| S0432 | Sinus piniformis | Sinus piniformis | | | | pSport1 | |
| | Tumour | Tumour | | | | | |
| S0434 | Stomach Normal | Stomach Normal | | | disease | pSport1 | |
| S0438 | Liver Normal Met5 No | Liver Normal | | | | pSport1 | |
| | | Met5 No | | | | | |
| S0440 | Liver Tumour Met 5 Tu | Liver Tumour | | | | pSport1 | |
| S0442 | Colon Normal | Colon Normal | | | | pSport1 | |
| S0444 | Colon Tumor | Colon Tumour | | | disease | pSport1 | |
| S0446 | Tongue Tumour | Tongue Tumour | | | | pSport1 | |
| S0452 | Thymus | Thymus | | | | pSport1 | |
| S0456 | Tongue Normal | Tongue Normal | | | | pSport1 | |
| S0458 | Thyroid Normal | Thyroid normal | | | | pSport1 | |
| | (SDCA2 No) | | | | | | |
| S0468 | Ea.hy.926 cell line | Ea.hy.926 cell line | | | | pSport1 | |
| S0472 | Lung Mesothelium | PYBT | | | | pSport1 | |
| S3012 | Smooth Muscle Serum | Smooth muscle | Pulmanary | Cell Line | | pBluescript | |
| | Treated, Norm | | artery | | | | |
| S3014 | Smooth muscle, serum | Smooth muscle | Pulmanary | Cell Line | | pBluescript | |
| | induced, re-exc | | artery | | | | |
| S6014 | H. hypothalamus, frac A | Hypothalamus | Brain | | | ZAP Express | |
| S6016 | H. Frontal Cortex, | H. Brain, Frontal | Brain | | disease | Uni-ZAP XR | |
| | Epileptic | Cortex, Epileptic | | | | | |
| S6022 | H. Adipose Tissue | Human Adipose | | | | Uni-ZAP XR | |
| | | Tissue | | | | | |
| S6024 | Alzheimers, spongy | Alzheimer's/Spongy | Brain | | disease | Uni-ZAP XR | |
| | change | change | | | | | |
| S6026 | Frontal Lobe, Dementia | Frontal Lobe | Brain | | | Uni-ZAP XR | |
| | | demential/Alzheimer's | | | | | |
| S6028 | Human Manic | Human Manic | Brain | | disease | Uni-ZAP XR | |
| | Depression Tissue | depression tissue | | | | | |
| T0002 | Activated T-cells | Activated T-Cell, | Blood | Cell Line | | pBluescript SK− | |
| | | PBL fraction | | | | | |
| T0004 | Human White Fat | Human White Fat | | | | pBluescript SK− | |
| T0006 | Human Pineal Gland | Human Pinneal | | | | pBluescript SK− | |
| | | Gland | | | | | |
| T0008 | Colorectal Tumor | Colorectal Tumor | | | disease | pBluescript SK− | |
| T0010 | Human Infant Brain | Human Infant Brain | | | | Other | |
| T0023 | Human Pancreatic | Human Pancreatic | | | disease | pBluescript SK− | |
| | Carcinoma | Carcinoma | | | | | |
| T0039 | HSA 172 Cells | Human HSA 172 cell | | | | pBluescript SK− | |
| | | line | | | | | |
| T0041 | Jurkat T-cell G1 phase | Jurkat T-cell | | | | pBluescript SK− | |
| T0042 | Jurkat T-Cell, S phase | Jurkat T-Cell Line | | | | pBluescript SK− | |
| T0048 | Human Aortic | Human Aortic | | | | pBluescript SK− | |
| | Endothelium | Endothilium | | | | | |
| T0049 | Aorta endothelial cells + | Aorta endothelial | | | | pBluescript SK− | |
| | TNF-a cells | | | | | | |
| T0060 | Human White Adipose | Human White Fat | | | | pBluescript SK− | |
| T0067 | Human Thyroid | Human Thyroid | | | | pBluescript SK− | |
| T0068 | Normal Ovary, Normal Ovary, | | | | pBluescript SK− | | |
| | Premenopausal | Premenopausal | | | | | |
| T0069 | Human Uterus, normal | Human Uterus, | | | | pBluescript SK− | |
| | | normal | | | | | |
| T0082 | Human Adult Retina | Human Adult Retina | | | | pBluescript SK− | |
| T0109 | Human (HCC) cell line | | | | | pBluescript SK− | |
| | liver (mouse) metastasis, | | | | | | |
| | remake | | | | | | |
| T0110 | Human colon carcinoma | | | | | pBluescript SK− | |
| | (HCC) cell line, remake | | | | | | |
| T0114 | Human (Caco-2) cell | | | | | pBluescript SK− | |
| | line, adenocarcinoma, | | | | | | |
| | colon, remake | | | | | | |
| L0002 | Atrium cDNA library | | | | | | |
| | Human heart | | | | | | |
| L0005 | Clontech human aorta | | | | | | |
| | polyA + mRNA (#6572) | | | | | | |
| L0021 | Human adult (K. Okubo) | | | | | | |
| L0022 | Human adult lung 3″ | | | | | | |
| | directed MboI cDNA | | | | | | |
| L0032 | Human chromosome | | | | | | |
| | 12p cDNAs | | | | | | |
| L0041 | Human epidermal | | | | | | |
| | keratinocyte | | | | | | |
| L0053 | Human pancreatic tumor | | | | | | |
| L0055 | Human promyelocyte | | | | | | |
| L0065 | Liver HepG2 cell line. | | | | | | |
| L0096 | Subtracted human retina | | | | | | |
| L0097 | Subtracted human | | | | | | |
| | retinal pigment | | | | | | |
| | epithelium (RPE) | | | | | | |
| L0105 | Human aorta polyA + | aorta | | | | | |
| | (TFujiwara) | | | | | | |
| L0118 | Human fetal brain S. | brain | | | | | |
| | Meier-Ewert | | | | | | |
| L0142 | Human placenta cDNA | placenta | | | | | |
| | (TFujiwara) | | | | | | |
| L0143 | Human placenta polyA + | placenta | | | | | |
| | (TFujiwara) | | | | | | |
| L0157 | Human fetal brain | | brain | | | | |
| | (TFujiwara) | | | | | | |
| L0163 | Human heart cDNA | | heart | | | | |
| | (YNakamura) | | | | | | |
| L0351 | Infant brain, Bento | | | | | BA, M13-derived | |
| | Soares | | | | | | |
| L0352 | Normalized infant brain | | | | | BA, M13-derived | |
| | Bento Soares | | | | | | |
| L0355 | P, Human foetal Brain | | | | | Bluescript | |
| | Whole tissue | | | | | | |
| L0362 | Stratagene ovarian | | | | | Bluescript SK− | |
| | cancer (#937219) | | | | | | |
| L0364 | NCI_CGAP_GC5 | germ cell tumor | | | | Bluescript SK− | |
| L0365 | NCI_CGAP_Phe1 | pheochromocytoma | | | | Bluescript SK− | |
| L0366 | Stratagene schizo brain | schizophrenic brain | | | | Bluescript SK− | |
| | S11 | S-11 frontal lobe | | | | | |
| L0367 | NCI_CGAP_Sch1 | Schwannoma tumor | | | | Bluescript SK− | |
| L0369 | NCI_CGAP_PAA1 | adrenal adenoma | adrenal gland | | | Bluescript SK− | |
| L0371 | NCI_CGAP_Br3 | breast tumor | breast | | | Bluescript SK− | |
| L0372 | NCI_CGAP_Co12 | colon tumor | colon | | | Bluescript SK− | |
| L0373 | NCI_CGAP_Co12 | tumor | colon | | | Bluescript SK− | |
| L0375 | NCI_CGAP_Kid6 | kidney tumor | kidney | | | Bluescript SK− | |
| L0376 | NCI_CGAP_Lar1 | larynx | larynx | | | Bluescript SK− | |
| L0378 | NCI_CGAP_Lu1 | lung tumor | lung | | | Bluescript SK− | |
| L0381 | NCI_CGAP_HN4 | squamous cell | pharynx | | | Bluescript SK− | |
| | | carcinoma | | | | | |
| L0384 | NCI_CGAP_Pr23 | prostate tumor | prostate | | | Bluescript SK− | |
| L0385 | NCI_CGAP_Gas1 | gastric tumor | stomach | | | Bluescript SK− | |
| L0386 | NCI_CGAP_HN3 | squamous cell | tongue | | | Bluescript SK− | |
| | | carcinoma from base | | | | | |
| | | of tongue | | | | | |
| L0387 | NCI_CGAP_GCB0 | germinal center B- | | | tonsil Bluescript SK− | | |
| | cells | | | | | | |
| L0388 | NCI_CGAP_{—HN6} | normal gingiva (cell | | | | Bluescript SK− | |
| | | line from | | | | | |
| | | immortalized kerati | | | | | |
| L0393 | B, Human Liver tissue | | | | | gt11 | |
| L0435 | Infant brain, LLNL | | | | | lafmid BA | |
| | array of Dr. M. Soares | | | | | | |
| | 1NIB | | | | | | |
| L0438 | normalized infant brain | total brain | brain | | | lafmid BA | |
| | cDNA | | | | | | |
| L0439 | Soares infant brain | | whole brain | | | Lafmid BA | |
| | 1NIB | | | | | | |
| L0455 | Human retina cDNA | retina | eye | | lambda gt10 | | |
| | randomly primed | | | | | | |
| | sublibrary | | | | | | |
| L0456 | Human retina cDNA | retina | eye | | | lambda gt10 | |
| | Tsp509I-cleaved | | | | | | |
| | sublibrary | | | | | | |
| L0471 | Human fetal heart, | | | | | Lambda ZAP | |
| | Lambda ZAP Express | | | | | Express | |
| L0475 | KG1-a Lambda Zap | | | KGI-a | | Lambda Zap | |
| | Express cDNA library | | | | | Express | |
| | | | | | | (Stratagene) | |
| L0480 | Stratagene cat #937212 | | | | | Lambda ZAP, | |
| | (1992) | | | | | pBluescript SK(−) | |
| L0483 | Human pancreatic islet | | | | | Lambda ZAPII | |
| L0485 | STRATAGENE Human | skeletal muscle | leg muscle | | | Lambda ZAPII | |
| | skeletal muscle cDNA | | | | | | |
| | library, cat. #936215. | | | | | | |
| L0499 | NCI_CGAP_HSC2 | stem cellz 34+/38+ | bone marrow | | | pAMP1 | |
| L0512 | NCI_CGAP_Ov36 | borderline ovarian | ovary | | | pAMP1 | |
| | | carcinoma | | | | | |
| L0517 | NCI_CGAP_Pr1 | | | | | pAMP10 | |
| L0518 | NCI_CGAP_Pr2 | | | | | pAMP10 | |
| L0519 | NCI_CGAP_Pr3 | | | | | pAMP10 | |
| L0520 | NCI_CGAP_Alv1 | alveolar | | | | pAMP10 | |
| | | rhabdomyosarcoma | | | | | |
| L0521 | NCI_CGAP_Ew1 | Ewing's sarcoma | | | | pAMP10 | |
| L0527 | NCI_CGAP_Ov2 | ovary | | | | pAMP10 | |
| L0528 | NCI_CGAP_Pr5 | prostate | | | | pAMP10 | |
| L0529 | NCI_CGAP_Pr6 | prostate | | | | pAMP10 | |
| L0534 | Chromosome 7 Fetal | brain | brain | | | pAMP10 | |
| | Brain cDNA Library | | | | | | |
| L0535 | NCI_CGAP_Br5 | infiltrating ductal | breast | | | pAMP10 | |
| | | carcinoma | | | | | |
| L0541 | NCI_CGAP_Pr7 | low-grade prostatic | prostate | | | pAMP10 | |
| | | neoplasia | | | | | |
| L0542 | NCI_CGAP_Pr11 | normal prostatic | prostate | | | pAMP10 | |
| | | epithelial cells | | | | | |
| L0543 | NCI_CGAP_Pr9 | normal prostatic | prostate | | | pAMP10 | |
| | | epithelial cells | | | | | |
| L0549 | NCI_CGAP_HN10 | carcinoma in situ | | | | pAMP10 | |
| | | from retromolar | | | | | |
| | | trigone | | | | | |
| L0551 | NCI_CGAP_HN7 | normal squamous | | | | pAMP10 | |
| | | epithelium, floor of | | | | | |
| | | mouth | | | | | |
| L0562 | Chromosome 7 HeLa | | | HeLa cell | | pAMP10 | |
| | cDNA Library | | | line; | | | |
| | | | | ATCC | | | |
| L0563 | Human Bone Marrow | bone marrow | | | | pBluescript | |
| | Stromal Fibroblast | | | | | | |
| L0564 | Jia bone marrow stroma | bone marrow stroma | | | | pBluescript | |
| L0565 | Normal Human | Bone | Hip | | | pBluescript | |
| | Trabecular Bone Cells | | | | | | |
| L0581 | Stratagene liver | | liver | | | pBluescript SK | |
| | (#937224) | | | | | | |
| L0588 | Stratagene endothelial | | | | | pBluescript SK− | |
| | cell 937223 | | | | | | |
| L0589 | Stratagene fetal retina | | | | | pBluescript SK− | |
| | 937202 | | | | | | |
| L0590 | Stratagene fibroblast | | | | | pBluescript SK− | |
| | (#937212) | | | | | | |
| L0591 | Stratagene HeLa cell s3 | | | | | pBluescript SK− | |
| | 937216 | | | | | | |
| L0592 | Stratagene hNT neuron | | | | | pBluescript SK− | |
| | (#937233) | | | | | | |
| L0593 | Stratagene | | | | | pBluescript SK− | |
| | neuroepithelium | | | | | | |
| | (#937231) | | | | | | |
| L0594 | Stratagene | | | | | pBluescript SK− | |
| | neuroepithelium | | | | | | |
| | NT2RAMI 937234 | | | | | | |
| L0595 | Stratagene NT2 | neuroepithelial cells | brain | | | pBluescript SK− | |
| | neuronal precursor | | | | | | |
| | 937230 | | | | | | |
| L0596 | Stratagene colon | | colon | | | pBluescript SK− | |
| | (#937204) | | | | | | |
| L0597 | Stratagene corneal | | cornea | | | pBluescript SK− | |
| | stroma (#937222) | | | | | | |
| L0598 | Morton Fetal Cochlea | cochlea | ear | | | pBluescript SK− | |
| L0599 | Stratagene lung | | lung | | | pBluescript SK− | |
| | (#937210) | | | | | | |
| L0600 | Weizmann Olfactory | olfactory epithelium | nose | | | pBluescript SK− | |
| | Epithelium | | | | | | |
| L0601 | Stratagene pancreas | | pancreas | | | pBluescript SK− | |
| | (#937208) | | | | | | |
| L0602 | Pancreatic Islet | pancreatic islet | pancreas | | | pBluescript SK− | |
| L0603 | Stratagene placenta | | placenta | | | pBluescript SK− | |
| | (#937225) | | | | | | |
| L0604 | Stratagene muscle | muscle | skeletal | | | pBluescript SK− | |
| | 937209 | | muscle | | | | |
| L0605 | Stratagene fetal spleen | fetal spleen | spleen | | | pBluescript SK− | |
| | (#937205) | | | | | | |
| L0606 | NCI_CGAP_Lym5 | follicular lymphoma | lymph node | | | pBluescript SK− | |
| L0607 | NCI_CGAP_Lym6 | mantle cell | lymph node | | | pBluescript SK− | |
| | | lymphoma | | | | | |
| L0608 | Stratagene lung | lung carcinoma | lung | NCI-H69 | | pBluescript SK− | |
| | carcinoma 937218 | | | | | | |
| L0611 | Schiller meningioma | meningioma | brain | | | pBluescript SK− | |
| | | | | | | (Stratagene) | |
| L0612 | Schiller | oligodendroglioma | brain | | | pBluescript SK− | |
| | oligodendroglioma | | | | | (Stratagene) | |
| L0619 | Chromosome 9 exon II | | | | | pBluescript IIKS+ | |
| L0623 | HM3 | pectoral muscle | | | | pcDNAII | |
| | | (after mastectomy) | | | | (Invitrogen) | |
| L0629 | NCI_CGAP_Mel3 | metastatic | bowel (skin | | | pCMV-SPORT4 | |
| | | melanoma to bowel | primary) | | | | |
| L0636 | NCI_CGAP_Pit1 | four pooled pituitary | brain | | | pCMV-SPORT6 | |
| | | adenomas | | | | | |
| L0637 | NCI_CGAP_Brn53 | three pooled | brain | | | pCMV-SPORT6 | |
| | | meningiomas | | | | | |
| L0638 | NCI_CGAP_Brn35 | tumor, 5 pooled (see | brain | | | pCMV-SPORT6 | |
| | | description) | | | | | |
| L0639 | NCI_CGAP_Brn52 | tumor, 5 pooled (see | brain | | | pCMV-SPORT6 | |
| | | description) | | | | | |
| L0640 | NCI_CGAP_Br18 | four pooled high- | breast | | | pCMV-SPORT6 | |
| | | grade tumors, | | | | | |
| | including two prima | | | | | | |
| L0643 | NCI_CGAP_Co19 | moderately | colon | | | pCMV-SPORT6 | |
| | | differentiated | | | | | |
| | | adenocarcinoma | | | | | |
| L0644 | NCI_CGAP_Co20 | moderately | colon | | | pCMV-SPORT6 | |
| | | differentiated | | | | | |
| | | adenocarcinoma | | | | | |
| L0645 | NCI_CGAP_Co21 | moderately | colon | | | pCMV-SPORT6 | |
| | | differentiated | | | | | |
| | | adenocarcinoma | | | | | |
| L0646 | NCI_CGAP_Co14 | moderately- | colon | | | pCMV-SPORT6 | |
| | | differentiated | | | | | |
| | | adenocarcinoma | | | | | |
| L0647 | NCI_CGAP_Sar4 | five pooled | connective | | | pCMV-SPORT6 | |
| | | sarcomas, including | tissue | | | | |
| | | myxoid liposarcoma | | | | | |
| L0648 | NCI_CGAP_Eso2 | squamous cell | esophagus | | | pCMV-SPORT6 | |
| | | carcinoma | | | | | |
| L0649 | NCI_CGAP_GU1 | 2 pooled high-grade | genitourinary | | | pCMV-SPORT6 | |
| | | transitional cell | tract | | | | |
| | | tumors | | | | | |
| L0650 | NCI_CGAP_Kid13 | 2 pooled Wilms' | kidney | | | pCMV-SPORT6 | |
| | | tumors, one primary | | | | | |
| | | and one metast | | | | | |
| L0651 | NCI_CGAP_Kid8 | renal cell tumor | kidney | | | pCMV-SPORT6 | |
| L0652 | NCI_CGAP_Lu27 | four pooled poorly- | lung | | | pCMV-SPORT6 | |
| | | differentiated | | | | | |
| | | adenocarcinomas | | | | | |
| L0653 | NCI_CGAP_Lu28 | two pooled | lung | | | pCMV-SPORT6 | |
| | | squamous cell | | | | | |
| | | carcinomas | | | | | |
| L0654 | NCI_CGAP_Lu31 | lung, cell line | | | pCMV-SPORT6 | | |
| L0655 | NCI_CGAP_Lym12 | lymphoma, lymph node | | | pCMV-SPORT6 | | |
| | | follicular mixed | | | | | |
| | | small and large cell | | | | | |
| L0656 | NCI_CGAP_Ov38 | normal epithelium | ovary | | | pCMV-SPORT6 | |
| L0657 | NCI_CGAP_Ov23 | tumor, 5 pooled (see | ovary | | | pCMV-SPORT6 | |
| | | description) | | | | | |
| L0659 | NCI_CGAP_Pan1 | adenocarcinoma | pancreas | | | pCMV-SPORT6 | |
| L0661 | NCI_CGAP_Mel15 | malignant | skin | | | pCMV-SPORT6 | |
| | | melanoma, | | | | | |
| | | metastatic to lymph | | | | | |
| | | node | | | | | |
| L0662 | NCI_CGAP_Gas4 | poorly differentiated | stomach | | | pCMV-SPORT6 | |
| | | adenocarcinoma | | | | | |
| | | with signet r | | | | | |
| L0663 | NCI_CGAP_Ut2 | moderately- | uterus | | | pCMV-SPORT6 | |
| | | differentiated | | | | | |
| | | endometrial | | | | | |
| | | adenocarcino | | | | | |
| L0664 | NCI_CGAP_Ut3 | poorly-differentiated | uterus | | | pCMV-SPORT6 | |
| | | endometrial | | | | | |
| | | adenocarcinoma, | | | | | |
| L0665 | NCI_CGAP_Ut4 | serous papillary | uterus | | | pCMV-SPORT6 | |
| | | carcinoma, high | | | | | |
| | | grade, 2 pooled t | | | | | |
| L0666 | NCI_CGAP_Uti | well-differentiated | uterus | | | pCMV-SPORT6 | |
| | | endometrial | | | | | |
| | | adenocarcinoma, 7 | | | | | |
| L0667 | NCI_CGAP_CML1 | myeloid cells, 18 | whole blood | | | pCMV-SPORT6 | |
| | | pooled CML cases, | | | | | |
| | | BCR/ABL rearra | | | | | |
| L0717 | Gessler Wilms tumor | | | | | pSPORT1 | |
| L0720 | PN001 - Normal Human | | prostate | | | pSport1 | |
| | Prostate | | | | | | |
| L0731 | Soares_pregnant_uterus_{—} | | uterus | | | pT7T3-Pac | |
| | NbHPU | | | | | | |
| L0740 | Soares melanocyte | melanocyte | | | | pT7T3D | |
| | 2NbHM | | | | | (Pharmacia) with | |
| | | | | | | a modified | |
| | | | | | | polylinker | |
| L0741 | Soares adult brain | | brain | | | pT7T3D | |
| | N2b4HB55Y | | | | | (Pharmacia) with | |
| | | | | | | a modified | |
| | | | | | | polylinker | |
| L0742 | Soares adult brain | | brain | | | pT7T3D | |
| | N2b5HB55Y | | | | | (Pharmacia) with | |
| | | | | | | a modified | |
| | | | | | | polylinker | |
| L0743 | Soares breast 2NbHBst | | breast | | | pT7T3D | |
| | | | | | | (Pharmacia) with | |
| | | | | | | a modified | |
| | | | | | | polylinker | |
| L0744 | Soares breast 3NbHBst | | breast | | | pT7T3D | |
| | | | | | | (Pharmacia) with | |
| | | | | | | amodified | |
| | | | | | | polylinker | |
| L0745 | Soares retina N2b4HR | retina | eye | | | pT7T3D | |
| | | | | | | (Pharmacia) with | |
| | | | | | | a modified | |
| | | | | | | polylinker | |
| L0746 | Soares retina N2b5HR | retina | eye | | | pT7T3D | |
| | | | | | | (Pharmacia) with | |
| | | | | | | a modified | |
| | | | | | | polylinker | |
| L0747 | Soares_fetal_heart_NbH | | heart | | | pT7T3D | |
| | H19W | | | | | (Pharmacia) with | |
| | | | | | | a modified | |
| | | | | | | polylinker | |
| L0748 | Soares fetal liver spleen | | Liver and | | | pT7T3D | |
| | 1NFLS | | Spleen | | | (Pharmacia) with | |
| | | | | | | a modified | |
| | | | | | | polylinker | |
| L0749 | Soares_fetal_liver_{—} | | Liver and | pT7T3D | | | |
| | spleen_1NFLS_S1 | | Spleen | (Pharmacia) with | | | |
| | | | | | | a modified | |
| | | | | | | polylinker | |
| L0750 | Soares_fetal_lung_NbH | | lung | | | pT7T3D | |
| | LI9W | | | | | (Pharmacia) with | |
| | | | | | | a modified | |
| | | | | | | polylinker | |
| L0751 | Soares ovary tumor | ovarian tumor | ovary | | | pT7T3D | |
| | NbHOT | | | | | (Pharmacia) with | |
| | | | | | | a modified | |
| | | | | | | polylinker | |
| L0752 | Soares_parathyroid_{—} | parathyroid tumor | parathyroid | | | pT7T3D | |
| | tumor_NbHPA | | gland | | | (Pharmacia) with | |
| | | | | | | a modified | |
| | | | | | | polylinker | |
| L0753 | Soares_pineal_gland_N | | pineal gland | | | pT7T3D | |
| | 3HPG | | | | | (Pharmacia) with | |
| | | | | | | a modified | |
| | | | | | | polylinker | |
| L0754 | Soares placenta Nb2HP | | placenta | | | pT7T3D | |
| | | | | | | (Pharmacia) with | |
| | | | | | | a modified | |
| | | | | | | polylinker | |
| L0755 | Soares_placenta_8to9 | | placenta | | | pT7T3D | |
| | weeks_2NbHP8to9W | | | | | (Pharmacia) with | |
| | | | | | | a modified | |
| | | | | | | polylinker | |
| L0756 | Soares_multiple_{—} | multiple sclerosis | | | | pT7T3D | |
| | sclerosis_2NbHMSP | lesions | | | | (Pharmacia) with | |
| | | | | | | a modified | |
| | | | | | | polylinker | |
| | | | | | | V_TYPE | |
| L0757 | Soares_senescent_{—} | senescent fibroblast | | | | pT7T3D | |
| | fibrolasts_NbHSF | | | | | (Pharmacia) with | |
| | | | | | | a modified | |
| | | | | | | polylinker | |
| | | | | | | V_TYPE | |
| L0758 | Soares_testis_NHT | | | | | pT7T3D-Pac | |
| | | | | | | (Pharmacia) with | |
| | | | | | | a modified | |
| | | | | | | polylinker | |
| L0759 | Soares total fetus Nb2 | | | | | pT7T3D-Pac | |
| | HF89w | | | | (Pharmacia) with | | |
| | | | | | | a modified | |
| | | | | | | polylinker | |
| L0761 | NCI_CGAP_CLL1 | B-cell, chronic | | | | pT7T3D-Pac | |
| | | lymphotic leukemia | | | | (Pharmacia) with | |
| | | | | | | a modified | |
| | | | | | | polylinker | |
| L0762 | NCI_CGAP_Br1.1 | breast | | | | pT7T3D-Pac | |
| | | | | | | (Pharmacia) with | |
| | | | | | | a modified | |
| | | | | | | polylinker | |
| L0763 | NCI_CGAP_Br2 | breast | | | | pT7T3D-Pac | |
| | | | | | | (Pharmacia) with | |
| | | | | | | a modified | |
| | | | | | | polylinker | |
| L0764 | NCI_CGAP_Co3 | colon | | | | pT7T3D-Pac | |
| | | | | | | (Pharmacia) with | |
| | | | | | | a modified | |
| | | | | | | polylinker | |
| L0766 | NCI_CGAP_GCB1 | germinal center B | | | | pT7T3D-Pac | |
| | | cell | | | | (Pharmacia) with | |
| | | | | | | a modified | |
| | | | | | | polylinker | |
| L0767 | NCI_CGAP_GC3 | pooled germ cell | | | | pT7T3D-Pac | |
| | tumors | | | | (Pharmacia) with | | |
| | | | | | | a modified | |
| | | | | | | polylinker | |
| L0768 | NCI_CGAP_GC4 | pooled germ cell | | | | pT7T3D-Pac | |
| | tumors | | | | (Pharmacia) with | | |
| | | | | | | a modified | |
| | | | | | | polylinker | |
| L0769 | NCI_CGAP_Brn25 | anaplastic | brain | | | pT7T3D-Pac | |
| | oligodendroglioma | | | | (Pharmacia) with | | |
| | | | | | | a modified | |
| | | | | | | polylinker | |
| L0770 | NCI_CGAP_Brn23 | glioblastoma | brain | | | pT7T3D-Pac | |
| | | (pooled) | | | | (Pharmacia) with | |
| | | | | | | a modified | |
| | | | | | | polylinker | |
| L0771 | NCI_CGAP_Co8 | adenocarcinoma | colon | | | pT7T3D-Pac | |
| | | | | | | (Pharmacia) with | |
| | | | | | | a modified | |
| | | | | | | polylinker | |
| L0772 | NCI_CGAP_Co10 | colon tumor RER+ | colon | | | pT7T3D-Pac | |
| | | | | | | (Pharmacia) with | |
| | | | | | | a modified | |
| | | | | | | polylinker | |
| L0773 | NCI_CGAP_Co9 | colon tumor RER+ | colon | | | pT7T3D-Pac | |
| | | | | | | (Pharmacia) with | |
| | | | | | | a modified | |
| | | | | | | polylinker | |
| L0774 | NCI_CGAP_Kid3 | | kidney | | | pT7T3D-Pac | |
| | | A | | | | (Pharmacia) with | |
| | | | | | | a modified | |
| | | | | | | polylinker | |
| L0775 | NCI_CGAP_Kid5 | 2 pooled tumors | kidney | | | pT7T3D-Pac | |
| | | (clear cell type) | | | | (Pharmacia) with | |
| | | | | | | a modified | |
| | | | | | | polylinker | |
| L0776 | NCI_CGAP_Lu5 | carcinoid | lung | | | pT7T3D-Pac | |
| | | | | | | (Pharmacia) with | |
| | | | | | | a modified | |
| | | | | | | polylinker | |
| L0777 | Soares_NhHMPu_S1 | Pooled human | mixed (see | | | pT7T3D-Pac | |
| | | melanocyte, fetal | below) | | | (Pharmacia) with | |
| | | heart, and pregnant | | | a modified | | |
| | | | | | | polylinker | |
| L0779 | Soares_NFL_T_GBC_S1 | | pooled | | | pT7T3D-Pac | |
| | | | | | | (Pharmacia) with | |
| | | | | | | a modified | |
| | | | | | | polylinker | |
| L0780 | Soares_NSF_F8_9W_O | | pooled | | | pT7T3D-Pac | |
| | T_PA_P_S1 | | | | | (Pharmacia) with | |
| | | | | | | a modified | |
| | | | | | | polylinker | |
| L0782 | NCI_CGAP_Pr21 | normal prostate | prostate | | | pT7T3D-Pac | |
| | | | | | | (Pharmacia) with | |
| | | | | | | a modified | |
| | | | | | | polylinker | |
| L0783 | NCI_CGAP_Pr22 | normal prostate | prostate | | | pT7T3D-Pac | |
| | | | | | | (Pharmacia) with | |
| | | | | | | a modified | |
| | | | | | | polylinker | |
| L0784 | NCI_CGAP_Lei2 | leiomyosarcoma | soft tissue | | | pT7T3D-Pac | |
| | | | | | | (Pharmacia) with | |
| | | | | | | a modified | |
| | | | | | | polylinker | |
| L0785 | Barstead spleen | | spleen | | | pT7T3D-Pac | |
| | HPLRB2 | | | | | (Pharmacia) with | |
| | | | | | | a modified | |
| | | | | | | polylinker | |
| L0786 | Soares_NbHFB | whole brain | | | pT7T3D-Pac | | |
| | | | | | | (Pharmacia) with | |
| | | | | | | a modified | |
| | | | | | | polylinker | |
| L0787 | NCI_CGAP_Sub1 | | | | | pT7T3D-Pac | |
| | | | | | | (Pharmacia) with | |
| | | | | | | a modified | |
| | | | | | | polylinker | |
| L0788 | NCI_CGAP_Sub2 | | | | | pT7T3D-Pac | |
| | | | | | | (Pharmacia) with | |
| | | | | | | a modified | |
| | | | | | | polylinker | |
| L0789 | NCI_CGAP_Sub3 | | | | | pT7T3D-Pac | |
| | | | | | | (Pharmacia) with | |
| | | | | | | a modified | |
| | | | | | | polylinker | |
| L0790 | NCI_CGAP_Sub4 | | | | | pT7T3D-Pac | |
| | | | | | | (Pharmacia) with | |
| | | | | | | a modified | |
| | | | | | | polylinker | |
| L0791 | NCI_CGAP_Sub5 | | | | | pT7T3D-Pac | |
| | | | | | | (Pharmacia) with | |
| | | | | | | a modified | |
| | | | | | | polylinker | |
| L0792 | NCI_CGAP_Sub6 | | | | | pT7T3D-Pac | |
| | | | | | | (Pharmacia) with | |
| | | | | | | a modified | |
| | | | | | | polylinker | |
| L0794 | NCI_CGAP_GC6 | pooled germ cell | | | | pT7T3D-Pac | |
| | | tumors | | | | (Pharmacia) with | |
| | | | | | | a modified | |
| | | | | | | polylinker | |
| L0796 | NCI_CGAP_Brn50 | medulloblastoma | brain | | | pT7T3D-Pac | |
| | | | | | | (Pharmacia) with | |
| | | | | | | a modified | |
| | | | | | | polylinker | |
| L0800 | NCI_CGAP_Co16 | colon tumor, RER+ | colon | | | | pT7T3D-Pac |
| | | | | | | (Pharmacia) with | |
| | | | | | | a modified | |
| | | | | | | polylinker | |
| L0803 | NCI_CGAP_Kid11 | | kidney | | | pT7T3D-Pac | |
| | | | | | | (Pharmacia) with | |
| | | | | | | a modified | |
| | | | | | | polylinker | |
| L0804 | NCI_CGAP_Kid12 | 2 pooled tumors | kidney | | | pT7T3D-Pac | |
| | | (clear cell type) | | | | (Pharmacia) with | |
| | | | | | | a modified | |
| | | | | | | polylinker | |
| L0805 | NCI_CGAP_Lu24 | carcinoid | lung | | | pT7T3D-Pac | |
| | | | | | | (Pharmacia) with | |
| | | | | | | a modified | |
| | | | | | | polylinker | |
| L0806 | NCI_CGAP_Lu19 | squamous cell | lung | | | pT7T3D-Pac | |
| | | carcinoma, poorly | | | | (Pharmacia) with | |
| | | differentiated (4 | | | | a modified | |
| | | | | | | polylinker | |
| L0808 | Barstead prostate BPH | prostate | | | pT7T3D-Pac | | |
| | HPLRB41 | | | | | (Pharmacia) with | |
| | | | | | | a modified | |
| | | | | | | polylinker | |
| L0809 | NCI_CGAP_Pr28 | prostate | | | pT7T3D-Pac | | |
| | | | | | | (Pharmacia) with | |
| | | | | | | a modified | |
| | | | | | | polylinker | |
| L2251 | Human fetal lung | Fetal lung | | | | | |

[0103] TABLE 5

| OMIM | |
|---|---|
| Reference | Description |
| 120550 | C1q deficiency, type A |
| 120570 | C1q deficiency, type B |
| 120575 | C1q deficiency, type C |
| 120950 | C8 deficiency, type I |
| 120960 | C8 deficiency, type II |
| 121800 | Corneal dystrophy, crystalline, Schnyder |
| 126650 | Chloride diarrhea, congenital, Finnish type, 214700 |
| 126650 | Colon cancer |
| 130500 | Elliptocytosis-1 |
| 133200 | Erythrokeratodermia variabilis |
| 138140 | Glucose transport defect, blood-brain barrier |
| 138190 | Diabetes mellitus, noninsulin-dependent |
| 150240 | Cutis laxa, marfanoid neonatal type |
| 154276 | Malignant hyperthermia susceptibility 3 |
| 154705 | Marfan syndrome, type II |
| 171760 | Hypophosphatasia, adult, 146300 |
| 171760 | Hypophosphatasia, infantile, 241500 |
| 173360 | Thrombophilia due to excessive plasminogen |
| | activator inhibitor |
| 173360 | Hemorrhagic diathesis due to PAI1 deficiency |
| 178300 | Ptosis, hereditary congenital, 1 |
| 180105 | Retinitis pigmentosa-10 |
| 187040 | Leukemia-1, T-cell acute lymphoblastic |
| 193300 | Renal cell carcinoma |
| 193300 | von Hippel-Lindau syndrome |
| 222800 | Hemolytic anemia due to bisphosphoglycerate mutase |
| | deficiency |
| 227646 | Fanconi anemia, type D |
| 246900 | Lipoamide dehydrogenase deficiency |
| 253260 | Biotinidase deficiency |
| 254210 | Myasthenia gravis, familial infantile |
| 255800 | Schwartz-Jampel syndrome |
| 271900 | Canavan disease |
| 278720 | Xeroderma pigmentosum, group C |
| 600101 | Deafness, autosomal dominant 2 |
| 600179 | Leber congenital amaurosis, type I, 204000 |
| 600650 | Myopathy due to CPT II deficiency, 25510 |
| 600650 | CPT deficiency, hepatic, type II, 600649 |
| 600722 | Ceroid lipofuscinosis, neuronal, variant juvenile type, |
| | with granular osmiophilic deposits |
| 600722 | Ceroid lipofuscinosis, neuronal-1, infantile, 256730 |
| 600977 | Cone dystrophy, progressive |
| 601154 | Cardiomyopathy, dilated, 1E |
| 601202 | Cataract, anterior polar-2 |
| 601253 | Muscular dystrophy, limb-girdle, type IC |
| 601777 | Cone dystrophy, progressive |
| 602011 | Pancreatic endocrine tumors |
| 602136 | Refsum disease, infantile, 266510 |
| 602136 | Zellweger syndrome-1, 214100 |
| 602136 | Adrenoleukodystrophy, neonatal, 202370 |
| 602447 | Coronary artery disease, susceptibility to |

[0104] Polynucleotide and Polypeptide Variants

[0105] The present invention is directed to variants of the polynucleotide sequence disclosed in SEQ ID NO:X or the complementary strand thereto, nucleotide sequences encoding the polypeptide of SEQ ID NO:Y, the nucleotide sequence of SEQ ID NO:X encoding the polypeptide sequence as defined in column 7 of Table 1A, nucleotide sequences encoding the polypeptide as defined in column 7 of Table 1A, the nucleotide sequence as defined in columns 8 and 9 of Table 2, nucleotide sequences encoding the polypeptide encoded by the nucleotide sequence as defined in columns 8 and 9 of Table 2, the nucleotide sequence as defined in column 6 of Table 1 B, nucleotide sequences encoding the polypeptide encoded by the nucleotide sequence as defined in column 6 of Table 1 B, the cDNA sequence contained in Clone ID NO:Z, and/or nucleotide sequences encoding the polypeptide encoded by the cDNA sequence contained in Clone ID NO:Z.

[0106] The present invention also encompasses variants of the polypeptide sequence disclosed in SEQ ID NO:Y, the polypeptide sequence as defined in column 7 of Table 1A, a polypeptide sequence encoded by the polynucleotide sequence in SEQ ID NO:X, a polypeptide sequence encoded by the nucleotide sequence as defined in columns 8 and 9 of Table 2, a polypeptide sequence encoded by the nucleotide sequence as defined in column 6 of Table 1B, a polypeptide sequence encoded by the complement of the polynucleotide sequence in SEQ ID NO:X, and/or a polypeptide sequence encoded by the cDNA sequence contained in Clone ID NO:Z.

[0107] “Variant” refers to a polynucleotide or polypeptide differing from the polynucleotide or polypeptide of the present invention, but retaining essential properties thereof. Generally, variants are overall closely similar, and, in many regions, identical to the polynucleotide or polypeptide of the present invention.

[0108] Thus, one aspect of the invention provides an isolated nucleic acid molecule comprising, or alternatively consisting of, a polynucleotide having a nucleotide sequence selected from the group consisting of: (a) a nucleotide sequence described in SEQ ID NO:X or contained in the cDNA sequence of Clone ID NO:Z; (b) a nucleotide sequence in SEQ ID NO:X or the cDNA in Clone ID NO:Z which encodes the complete amino acid sequence of SEQ ID NO:Y or the complete amino acid sequence encoded by the cDNA in Clone ID NO:Z; (c) a nucleotide sequence in SEQ ID NO:X or the cDNA in Clone ID NO:Z which encodes a mature polypeptide; (d) a nucleotide sequence in SEQ ID NO:X or the cDNA sequence of Clone ID NO:Z, which encodes a biologically active fragment of a polypeptide; (e) a nucleotide sequence in SEQ ID NO:X or the cDNA sequence of Clone ID NO:Z, which encodes an antigenic fragment of a polypeptide; (f) a nucleotide sequence encoding a polypeptide comprising the complete amino acid sequence of SEQ ID NO:Y or the complete amino acid sequence encoded by the cDNA in Clone ID NO:Z; (g) a nucleotide sequence encoding a mature polypeptide of the amino acid sequence of SEQ ID NO:Y or the amino acid sequence encoded by the cDNA in Clone ID NO:Z; (h) a nucleotide sequence encoding a biologically active fragment of a polypeptide having the complete amino acid sequence of SEQ ID NO:Y or the complete amino acid sequence encoded by the cDNA in Clone ID NO:Z; (i) a nucleotide sequence encoding an antigenic fragment of a polypeptide having the complete amino acid sequence of SEQ ID NO:Y or the complete amino acid sequence encoded by the cDNA in Clone ID NO:Z; and 0) a nucleotide sequence complementary to any of the nucleotide sequences in (a), (b), (c), (d), (e), (f), (g), (h), or (i) above.

[0109] The present invention is also directed to nucleic acid molecules which comprise, or alternatively consist of, a nucleotide sequence which is at least 80%, 85%, 90%, 95%, 96%, 97%, 98%, 99% or 100%, identical to, for example, any of the nucleotide sequences in (a), (b), (c), (d), (e), (f), (g), (h), (i), or (j) above, the nucleotide coding sequence in SEQ ID NO:X or the complementary strand thereto, the nucleotide coding sequence of the cDNA contained in Clone ID NO:Z or the complementary strand thereto, a nucleotide sequence encoding the polypeptide of SEQ ID NO:Y, a nucleotide sequence encoding a polypeptide sequence encoded by the nucleotide sequence in SEQ ID NO:X, a polypeptide sequence encoded by the complement of the polynucleotide sequence in SEQ ID NO:X, a nucleotide sequence encoding the polypeptide encoded by the cDNA contained in Clone ID NO:Z, the nucleotide coding sequence in SEQ ID NO:X as defined in columns 8 and 9 of Table 2 or the complementary strand thereto, a nucleotide sequence encoding the polypeptide encoded by the nucleotide sequence in SEQ ID NO:X as defined in columns 8 and 9 of Table 2 or the complementary strand thereto, the nucleotide coding sequence in SEQ ID NO:B as defined in column 6 of Table 1B or the complementary strand thereto, a nucleotide sequence encoding the polypeptide encoded by the nucleotide sequence in SEQ ID NO:B as defined in column 6 of Table 1B or the complementary strand thereto, the nucleotide sequence in SEQ ID NO:X encoding the polypeptide sequence as defined in column 7 of Table 1A or the complementary strand thereto, nucleotide sequences encoding the polypeptide as defined in column 7 of Table 1A or the complementary strand thereto, and/or polynucleotide fragments of any of these nucleic acid molecules (e.g., those fragments described herein). Polynucleotides which hybridize to the complement of these nucleic acid molecules under stringent hybridization conditions or alternatively, under lower stringency conditions, are also encompassed by the invention, as are polypeptides encoded by these polynucleotides and nucleic acids.

[0110] In a preferred embodiment, the invention encompasses nucleic acid molecules which comprise, or alternatively, consist of a polynucleotide which hybridizes under stringent hybridization conditions, or alternatively, under lower stringency conditions, to a polynucleotide in (a), (b), (c), (d), (e), (f), (g), (h), or (i), above, as are polypeptides encoded by these polynucleotides. In another preferred embodiment, polynucleotides which hybridize to the complement of these nucleic acid molecules under stringent hybridization conditions, or alternatively, under lower stringency conditions, are also encompassed by the invention, as are polypeptides encoded by these polynucleotides.

[0111] In another embodiment, the invention provides a purified protein comprising, or alternatively consisting of, a polypeptide having an amino acid sequence selected from the group consisting of: (a) the complete amino acid sequence of SEQ ID NO:Y or the complete amino acid sequence encoded by the cDNA in Clone ID NO:Z; (b) the amino acid sequence of a mature form of a polypeptide having the amino acid sequence of SEQ ID NO:Y or the amino acid sequence encoded by the cDNA in Clone ID NO:Z; (c) the amino acid sequence of a biologically active fragment of a polypeptide having the complete amino acid sequence of SEQ ID NO:Y or the complete amino acid sequence encoded by the cDNA in Clone ID NO:Z; and (d) the amino acid sequence of an antigenic fragment of a polypeptide having the complete amino acid sequence of SEQ ID NO:Y or the complete amino acid sequence encoded by the cDNA in Clone ID NO:Z.

[0112] The present invention is also directed to proteins which comprise, or alternatively consist of, an amino acid sequence which is at least 80%, 85%, 90%, 95%, 96%, 97%, 98%, 99% or 100%, identical to, for example, any of the amino acid sequences in (a), (b), (c), or (d), above, the amino acid sequence shown in SEQ ID NO:Y, the amino acid sequence encoded by the cDNA contained in Clone ID NO:Z, the amino acid sequence of the polypeptide encoded by the nucleotide sequence in SEQ ID NO:X as defined in columns 8 and 9 of Table 2, the amino acid sequence of the polypeptide encoded by the nucleotide sequence in SEQ ID NO:B as defined in column 6 of Table 1B, the amino acid sequence as defined in column 7 of Table 1A, an amino acid sequence encoded by the nucleotide sequence in SEQ ID NO:X, and an amino acid sequence encoded by the complement of the polynucleotide sequence in SEQ ID NO:X. Fragments of these polypeptides are also provided (e.g., those fragments described herein). Further proteins encoded by polynucleotides which hybridize to the complement of the nucleic acid molecules encoding these amino acid sequences under stringent hybridization conditions or alternatively, under lower stringency conditions, are also encompassed by the invention, as are the polynucleotides encoding these proteins.

[0113] By a nucleic acid having a nucleotide sequence at least, for example, 95% “identical” to a reference nucleotide sequence of the present invention, it is intended that the nucleotide sequence of the nucleic acid is identical to the reference sequence except that the nucleotide sequence may include up to five point mutations per each 100 nucleotides of the reference nucleotide sequence encoding the polypeptide. In other words, to obtain a nucleic acid having a nucleotide sequence at least 95% identical to a reference nucleotide sequence, up to 5% of the nucleotides in the reference sequence may be deleted or substituted with another nucleotide, or a number of nucleotides up to 5% of the total nucleotides in the reference sequence may be inserted into the reference sequence. The query sequence may be an entire sequence referred to in Table 1A or 2 as the ORF (open reading frame), or any fragment specified as described herein.

[0114] As a practical matter, whether any particular nucleic acid molecule or polypeptide is at least 80%, 85%, 90%, 95%, 96%, 97%, 98% or 99% identical to a nucleotide sequence of the present invention can be determined conventionally using known computer programs. A preferred method for determining the best overall match between a query sequence (a sequence of the present invention) and a subject sequence, also referred to as a global sequence alignment, can be determined using the FASTDB computer program based on the algorithm of Brutlag et al. (Comp. App. Biosci. 6:237-245 (1990)). In a sequence alignment the query and subject sequences are both DNA sequences. An RNA sequence can be compared by converting U's to T's. The result of said global sequence alignment is expressed as percent identity. Preferred parameters used in a FASTDB alignment of DNA sequences to calculate percent identity are: Matrix=Unitary, k-tuple=4, Mismatch Penalty=1, Joining Penalty=30, Randomization Group Length=0, Cutoff Score=l, Gap Penalty=5, Gap Size Penalty 0.05, Window Size=500 or the length of the subject nucleotide sequence, whichever is shorter.

[0115] If the subject sequence is shorter than the query sequence because of 5′ or 3′ deletions, not because of internal deletions, a manual correction must be made to the results. This is because the FASTDB program does not account for 5′ and 3′ truncations of the subject sequence when calculating percent identity. For subject sequences truncated at the 5′ or 3′ ends, relative to the query sequence, the percent identity is corrected by calculating the number of bases of the query sequence that are 5′ and 3′ of the subject sequence, which are not matched/aligned, as a percent of the total bases of the query sequence. Whether a nucleotide is matched/aligned is determined by results of the FASTDB sequence alignment. This percentage is then subtracted from the percent identity, calculated by the above FASTDB program using the specified parameters, to arrive at a final percent identity score. This corrected score is what is used for the purposes of the present invention. Only bases outside the 5′ and 3′ bases of the subject sequence, as displayed by the FASTDB alignment, which are not matched/aligned with the query sequence, are calculated for the purposes of manually adjusting the percent identity score.

[0116] For example, a 90 base subject sequence is aligned to a 100 base query sequence to determine percent identity. The deletions occur at the 5′ end of the subject sequence and therefore, the FASTDB alignment does not show a matched/alignment of the first 10 bases at 5′ end. The 10 unpaired bases represent 10% of the sequence (number of bases at the 5′ and 3′ ends not matched/total number of bases in the query sequence) so 10% is subtracted from the percent identity score calculated by the FASTDB program. If the remaining 90 bases were perfectly matched the final percent identity would be 90%. In another example, a 90 base subject sequence is compared with a 100 base query sequence. This time the deletions are internal deletions so that there are no bases on the 5′ or 3′ of the subject sequence which are not matched/aligned with the query. In this case the percent identity calculated by FASTDB is not manually corrected. Once again, only bases 5′ and 3′ of the subject sequence which are not matched/aligned with the query sequence are manually corrected for. No other manual corrections are to be made for the purposes of the present invention.

[0117] By a polypeptide having an amino acid sequence at least, for example, 95% “identical” to a query amino acid sequence of the present invention, it is intended that the amino acid sequence of the subject polypeptide is identical to the query sequence except that the subject polypeptide sequence may include up to five amino acid alterations per each 100 amino acids of the query amino acid sequence. In other words, to obtain a polypeptide having an amino acid sequence at least 95% identical to a query amino acid sequence, up to 5% of the amino acid residues in the subject sequence may be inserted, deleted, (indels) or substituted with another amino acid. These alterations of the reference sequence may occur at the amino or carboxy terminal positions of the reference amino acid sequence or anywhere between those terminal positions, interspersed either individually among residues in the reference sequence or in one or more contiguous groups within the reference sequence.

[0118] As a practical matter, whether any particular polypeptide is at least 80%, 85%, 90%, 95%, 96%, 97%, 98% or 99% identical to, for instance, the amino acid sequence of a polypeptide referred to in Table 1A (e.g., the amino acid sequence identified in column 6) or Table 2 (e.g., the amino acid sequence of the polypeptide encoded by the polynucleotide sequence defined in columns 8 and 9 of Table 2) or a fragment thereof, the amino acid sequence of the polypeptide encoded by the polynucleotide sequence in SEQ ID NO:B as defined in column 6 of Table 1B or a fragment thereof, the amino acid sequence of the polypeptide encoded by the nucleotide sequence in SEQ ID NO:X or a fragment thereof, or the amino acid sequence of the polypeptide encoded by cDNA contained in Clone ID NO:Z, or a fragment thereof, can be determined conventionally using known computer programs. A preferred method for determining the best overall match between a query sequence (a sequence of the present invention) and a subject sequence, also referred to as a global sequence alignment, can be determined using the FASTDB computer program based on the algorithm of Brutlag et al. (Comp. App. Biosci.6:237-245 (1990)). In a sequence alignment the query and subject sequences are either both nucleotide sequences or both amino acid sequences. The result of said global sequence alignment is expressed as percent identity. Preferred parameters used in a FASTDB amino acid alignment are: Matrix=PAM 0, k-tuple=2, Mismatch Penalty=1, Joining Penalty=20, Randomization Group Length=0, Cutoff Score=1, Window Size=sequence length, Gap Penalty=5, Gap Size Penalty=0.05, Window Size=500 or the length of the subject amino acid sequence, whichever is shorter.

[0119] If the subject sequence is shorter than the query sequence due to N- or C-terminal deletions, not because of internal deletions, a manual correction must be made to the results. This is because the FASTDB program does not account for N- and C-terminal truncations of the subject sequence when calculating global percent identity. For subject sequences truncated at the N- and C-termini, relative to the query sequence, the percent identity is corrected by calculating the number of residues of the query sequence that are N- and C-terminal of the subject sequence, which are not matched/aligned with a corresponding subject residue, as a percent of the total bases of the query sequence. Whether a residue is matched/aligned is determined by results of the FASTDB sequence alignment. This percentage is then subtracted from the percent identity, calculated by the above FASTDB program using the specified parameters, to arrive at a final percent identity score. This final percent identity score is what is used for the purposes of the present invention. Only residues to the N- and C-termini of the subject sequence, which are not matched/aligned with the query sequence, are considered for the purposes of manually adjusting the percent identity score. That is, only query residue positions outside the farthest N- and C- terminal residues of the subject sequence.

[0120] For example, a 90 amino acid residue subject sequence is aligned with a 100 residue query sequence to determine percent identity. The deletion occurs at the N-terminus of the subject sequence and therefore, the FASTDB alignment does not show a matching/alignment of the first 10 residues at the N-terminus. The 10 unpaired residues represent 10% of the sequence (number of residues at the N- and C- termini not matched/total number of residues in the query sequence) so 10% is subtracted from the percent identity score calculated by the FASTDB program. If the remaining 90 residues were perfectly matched the final percent identity would be 90%. In another example, a 90 residue subject sequence is compared with a 100 residue query sequence. This time the deletions are internal deletions so there are no residues at the N- or C-termini of the subject sequence which are not matched/aligned with the query. In this case the percent identity calculated by FASTDB is not manually corrected. Once again, only residue positions outside the N- and C-terminal ends of the subject sequence, as displayed in the FASTDB alignment, which are not matched/aligned with the query sequnce are manually corrected for. No other manual corrections are to made for the purposes of the present invention.

[0121] The polynucleotide variants of the invention may contain alterations in the coding regions, non-coding regions, or both. Especially preferred are polynucleotide variants containing alterations which produce silent substitutions, additions, or deletions, but do not alter the properties or activities of the encoded polypeptide. Nucleotide variants produced by silent substitutions due to the degeneracy of the genetic code are preferred. Moreover, polypeptide variants in which less than 50, less than 40, less than 30, less than 20, less than 10, or 5-50, 5-25, 5-10, 1-5, or 1-2 amino acids are substituted, deleted, or added in any combination are also preferred. Polynucleotide variants can be produced for a variety of reasons, e.g., to optimize codon expression for a particular host (change codons in the human mRNA to those preferred by a bacterial host such as E. coli).

[0122] Naturally occurring variants are called “allelic variants,” and refer to one of several alternate forms of a gene occupying a given locus on a chromosome of an organism. (Genes II, Lewin, B., ed., John Wiley & Sons, New York (1985)). These allelic variants can vary at either the polynucleotide and/or polypeptide level and are included in the present invention. Alternatively, non-naturally occurring variants may be produced by mutagenesis techniques or by direct synthesis.

[0123] Using known methods of protein engineering and recombinant DNA technology, variants may be generated to improve or alter the characteristics of the polypeptides of the present invention. For instance, one or more amino acids can be deleted from the N-tenninus or C-terminus of the polypeptide of the present invention without substantial loss of biological function. As an example, Ron et al. (J. Biol. Chem. 268: 2984-2988 (1993)) reported variant KGF proteins having heparin binding activity even after deleting 3, 8, or 27 amino-terminal amino acid residues. Similarly, Interferon gamma exhibited up to ten times higher activity after deleting 8-10 amino acid residues from the carboxy terminus of this protein. (Dobeli et al., J. Biotechnology 7:199-216 (1988).)

[0124] Moreover, ample evidence demonstrates that variants often retain a biological activity similar to that of the naturally occurring protein. For example, Gayle and coworkers (J. Biol. Chem. 268:22105-22111 (1993)) conducted extensive mutational analysis of human cytokine IL-1a. They used random mutagenesis to generate over 3,500 individual IL-1a mutants that averaged 2.5 amino acid changes per variant over the entire length of the molecule. Multiple mutations were examined at every possible amino acid position. The investigators found that “[m]ost of the molecule could be altered with little effect on either [binding or biological activity].” In fact, only 23 unique amino acid sequences, out of more than 3,500 nucleotide sequences examined, produced a protein that significantly differed in activity from wild-type.

[0125] Furthermore, even if deleting one or more amino acids from the N-terminus or C-terminus of a polypeptide results in modification or loss of one or more biological functions, other biological activities may still be retained. For example, the ability of a deletion variant to induce and/or to bind antibodies which recognize the secreted form will likely be retained when less than the majority of the residues of the secreted form are removed from the N-terminus or C-terminus. Whether a particular polypeptide lacking N- or C-terminal residues of a protein retains such immunogenic activities can readily be determined by routine methods described herein and otherwise known in the art.

[0126] Thus, the invention further includes polypeptide variants which show a functional activity (e.g., biological activity) of the polypeptides of the invention. Such variants include deletions, insertions, inversions, repeats, and substitutions selected according to general rules known in the art so as have little effect on activity.

[0127] The present application is directed to nucleic acid molecules at least 80%, 85%, 90%, 95%, 96%, 97%, 98%, 99% or 100% identical to the nucleic acid sequences disclosed herein, (e.g., encoding a polypeptide having the amino acid sequence of an N and/or C terminal deletion), irrespective of whether they encode a polypeptide having functional activity. This is because even where a particular nucleic acid molecule does not encode a polypeptide having functional activity, one of skill in the art would still know how to use the nucleic acid molecule, for instance, as a hybridization probe or a polymerase chain reaction (PCR) primer. Uses of the nucleic acid molecules of the present invention that do not encode a polypeptide having functional activity include, inter alia, (1) isolating a gene or allelic or splice variants thereof in a cDNA library; (2) in situ hybridization (e.g., “FISH”) to metaphase chromosomal spreads to provide precise chromosomal location of the gene, as described in Verma et al., Human Chromosomes: A Manual of Basic Techniques, Pergamon Press, New York (1988); (3) Northern Blot analysis for detecting mRNA expression in specific tissues (e.g., normal or diseased tissues); and (4) in situ hybridization (e.g., histochemistry) for detecting mRNA expression in specific tissues (e.g., normal or diseased tissues).

[0128] Preferred, however, are nucleic acid molecules having sequences at least 80%, 85%, 90%, 95%, 96%, 97%, 98%, 99% or 100% identical to the nucleic acid sequences disclosed herein, which do, in fact, encode a polypeptide having functional activity. By a polypeptide having “functional activity” is meant, a polypeptide capable of displaying one or more known functional activities associated with a full-length (complete) protein of the invention. Such functional activities include, but are not limited to, biological activity, antigenicity [ability to bind (or compete with a polypeptide of the invention for binding) to an anti-polypeptide of the invention antibody], immunogenicity (ability to generate antibody which binds to a specific polypeptide of the invention), ability to form multimers with polypeptides of the invention, and ability to bind to a receptor or ligand for a polypeptide of the invention.

[0129] The functional activity of the polypeptides, and fragments, variants and derivatives of the invention, can be assayed by various methods.

[0130] For example, in one embodiment where one is assaying for the ability to bind or compete with a full-length polypeptide of the present invention for binding to an anti-polypetide antibody, various immunoassays known in the art can be used, including but not limited to, competitive and non-competitive assay systems using techniques such as radioimmunoassays, ELISA (enzyme linked immunosorbent assay), “sandwich” immunoassays, immunoradiometric assays, gel diffusion precipitation reactions, immunodiffusion assays, in situ immunoassays (using colloidal gold, enzyme or radioisotope labels, for example), western blots, precipitation reactions, agglutination assays (e.g., gel agglutination assays, hemagglutination assays), complement fixation assays, immunofluorescence assays, protein A assays, and immunoelectrophoresis assays, etc. In one embodiment, antibody binding is detected by detecting a label on the primary antibody. In another embodiment, the primary antibody is detected by detecting binding of a secondary antibody or reagent to the primary antibody. In a further embodiment, the secondary antibody is labeled. Many means are known in the art for detecting binding in an immunoassay and are within the scope of the present invention.

[0131] In another embodiment, where a ligand is identified, or the ability of a polypeptide fragment, variant or derivative of the invention to multimerize is being evaluated, binding can be assayed, e.g., by means well-known in the art, such as, for example, reducing and non-reducing gel chromatography, protein affinity chromatography, and affinity blotting. See generally, Phizicky et al., Microbiol. Rev. 59:94-123 (1995). In another embodiment, the ability of physiological correlates of a polypeptide of the present invention to bind to a substrate(s) of the polypeptide of the invention can be routinely assayed using techniques known in the art.

[0132] In addition, assays described herein (see Examples) and otherwise known in the art may routinely be applied to measure the ability of polypeptides of the present invention and fragments, variants and derivatives thereof to elicit polypeptide related biological activity (either in vitro or in vivo). Other methods will be known to the skilled artisan and are within the scope of the invention.

[0133] Of course, due to the degeneracy of the genetic code, one of ordinary skill in the art will immediately recognize that a large number of the nucleic acid molecules having a sequence at least 80%, 85%, 90%, 95%, 96%, 97%, 98%, 99%, or 100% identical to, for example, the nucleic acid sequence of the cDNA contained in Clone ID NO:Z, the nucleic acid sequence referred to in Table 1A (SEQ ID NO:X), the nucleic acid sequence disclosed in Table 2 (e.g,. the nucleic acid sequence delineated in columns 8 and 9) or fragments thereof, will encode polypeptides “having functional activity.” In fact, since degenerate variants of any of these nucleotide sequences all encode the same polypeptide, in many instances, this will be clear to the skilled artisan even without performing the above described comparison assay. It will be further recognized in the art that, for such nucleic acid molecules that are not degenerate variants, a reasonable number will also encode a polypeptide having functional activity. This is because the skilled artisan is fully aware of amino acid substitutions that are either less likely or not likely to significantly effect protein function (e.g., replacing one aliphatic amino acid with a second aliphatic amino acid), as further described below.

[0134] For example, guidance concerning how to make phenotypically silent amino acid substitutions is provided in Bowie et al., “Deciphering the Message in Protein Sequences: Tolerance to Amino Acid Substitutions,” Science 247:1306-1310 (1990), wherein the authors indicate that there are two main strategies for studying the tolerance of an amino acid sequence to change.

[0135] The first strategy exploits the tolerance of amino acid substitutions by natural selection during the process of evolution. By comparing amino acid sequences in different species, conserved amino acids can be identified. These conserved amino acids are likely important for protein function. In contrast, the amino acid positions where substitutions have been tolerated by natural selection indicates that these positions are not critical for protein function. Thus, positions tolerating amino acid substitution could be modified while still maintaining biological activity of the protein.

[0136] The second strategy uses genetic engineering to introduce amino acid changes at specific positions of a cloned gene to identify regions critical for protein function. For example, site directed mutagenesis or alanine-scanning mutagenesis (introduction of single alanine mutations at every residue in the molecule) can be used. See Cunningham and Wells, Science 244:1081-1085 (1989). The resulting mutant molecules can then be tested for biological activity.

[0137] As the authors state, these two strategies have revealed that proteins are surprisingly tolerant of amino acid substitutions. The authors further indicate which amino acid changes are likely to be permissive at certain amino acid positions in the protein. For example, most buried (within the tertiary structure of the protein) amino acid residues require nonpolar side chains, whereas few features of surface side chains are generally conserved. Moreover, tolerated conservative amino acid substitutions involve replacement of the aliphatic or hydrophobic amino acids Ala, Val, Leu and Ile; replacement of the hydroxyl residues Ser and Thr; replacement of the acidic residues Asp and Glu; replacement of the amide residues Asn and Gln, replacement of the basic residues Lys, Arg, and His; replacement of the aromatic residues Phe, Tyr, and Trp, and replacement of the small-sized amino acids Ala, Ser, Thr, Met, and Gly. Besides conservative amino acid substitution, variants of the present invention include (i) substitutions with one or more of the non-conserved amino acid residues, where the substituted amino acid residues may or may not be one encoded by the genetic code, or (ii) substitutions with one or more of the amino acid residues having a substituent group, or (iii) fusion of the mature polypeptide with another compound, such as a compound to increase the stability and/or solubility of the polypeptide (for example, polyethylene glycol), (iv) fusion of the polypeptide with additional amino acids, such as, for example, an IgG Fc fusion region peptide, serum albumin (preferably human serum albumin) or a fragment thereof, or leader or secretory sequence, or a sequence facilitating purification, or (v) fusion of the polypeptide with another compound, such as albumin (including but not limited to recombinant albumin (see, e.g., U.S. Pat. No. 5,876,969, issued Mar. 2, 1999, EP Patent 0 413 622, and U.S. Pat. No. 5,766,883, issued Jun. 16, 1998, herein incorporated by reference in their entirety)). Such variant polypeptides are deemed to be within the scope of those skilled in the art from the teachings herein.

[0138] For example, polypeptide variants containing amino acid substitutions of charged amino acids with other charged or neutral amino acids may produce proteins with improved characteristics, such as less aggregation. Aggregation of pharmaceutical formulations both reduces activity and increases clearance due to the aggregate's immunogenic activity. See Pinckard et al., Clin. Exp. Immunol. 2:331-340 (1967); Robbins et al., Diabetes 36: 838-845 (1987); Cleland et al., Crit. Rev. Therapeutic Drug Carrier Systems 10:307-377 (1993). 11291 A further embodiment of the invention relates to polypeptides which comprise the amino acid sequence of a polypeptide having an amino acid sequence which contains at least one amino acid substitution, but not more than 50 amino acid substitutions, even more preferably, not more than 40 amino acid substitutions, still more preferably, not more than 30 amino acid substitutions, and still even more preferably, not more than 20 amino acid substitutions from a polypeptide sequence disclosed herein. Of course it is highly preferable for a polypeptide to have an amino acid sequence which comprises the amino acid sequence of a polypeptide of SEQ ID NO:Y, an amino acid sequence encoded by SEQ ID NO:X, an amino acid sequence encoded by the portion of SEQ ID NO:X as defined in columnns 8 and 9 of Table 2, an amino acid sequence encoded by the complement of SEQ ID NO:X, and/or an amino acid sequence encoded by cDNA contained in Clone ID NO:Z which contains, in order of ever-increasing preference, at least one, but not more than 10, 9, 8, 7, 6, 5, 4, 3, 2 or 1 amino acid substitutions.

[0139] In specific embodiments, the polypeptides of the invention comprise, or alternatively, consist of, fragments or variants of a reference amino acid sequence selected from: (a) the amino acid sequence of SEQ ID NO:Y or fragments thereof (e.g., the mature form and/or other fragments described herein); (b) the amino acid sequence encoded by SEQ ID NO:X or fragments thereof; (c) the amino acid sequence encoded by the complement of SEQ ID NO:X or fragments thereof; (d) the amino acid sequence encoded by the portion of SEQ ID NO:X as defined in columns 8 and 9 of Table 2 or fragments thereof; and (e) the amino acid sequence encoded by cDNA contained in Clone ID NO:Z or fragments thereof; wherein the fragments or variants have 1-5, 5-10, 5-25, 5-50, 10-50 or 50-150, amino acid residue additions, substitutions, and/or deletions when compared to the reference amino acid sequence. In preferred embodiments, the amino acid substitutions are conservative. Polynucleotides encoding these polypeptides are also encompassed by the invention.

[0140] Polynucleotide and Polypeptide Fragments

[0141] The present invention is also directed to polynucleotide fragments of the polynucleotides (nucleic acids) of the invention. In the present invention, a “polynucleotide fragment” refers to a polynucleotide having a nucleic acid sequence which, for example: is a portion of the cDNA contained in Clone ID NO:Z or the complementary strand thereto; is a portion of the polynucleotide sequence encoding the polypeptide encoded by the cDNA contained in Clone ID NO:Z or the complementary strand thereto; is a portion of a polynucleotide sequence encoding the amino acid sequence encoded by the region of SEQ ID NO:X as defined in columns 8 and 9 of Table 2 or the complementary strand thereto; is a portion of the polynucleotide sequence of SEQ ID NO:X as defined in columns 8 and 9 of Table 2 or the complementary strand thereto; is a portion of the polynucleotide sequence in SEQ ID NO:X or the complementary strand thereto; is a polynucleotide sequence encoding a portion of the polypeptide of SEQ ID NO:Y; is a polynucleotide sequence encoding a portion of a polypeptide encoded by SEQ ID NO:X; is a polynucleotide sequence encoding a portion of a polypeptide encoded by the complement of the polynucleotide sequence in SEQ ID NO:X; is a portion of a polynucleotide sequence encoding the amino acid sequence encoded by the region of SEQ ID NO:B as defined in column 6 of Table 1B or the complementary strand thereto; or is a portion of the polynucleotide sequence of SEQ ID NO:B as defined in column 6 of Table 1B or the complementary strand thereto.

[0142] The polynucleotide fragments of the invention are preferably at least about 15 nt, and more preferably at least about 20 nt, still more preferably at least about 30 nt, and even more preferably, at least about 40 nt, at least about 50 nt, at least about 75 nt, or at least about 150 nt in length. A fragment “at least 20 nt in length,” for example, is intended to include 20 or more contiguous bases from the cDNA sequence contained in Clone ID NO:Z, or the nucleotide sequence shown in SEQ ID NO:X or the complementary stand thereto. In this context “about” includes the particularly recited value or a value larger or smaller by several (5, 4, 3, 2, or 1) nucleotides, at either terminus or at both termini. These nucleotide fragments have uses that include, but are not limited to, as diagnostic probes and primers as discussed herein. Of course, larger fragments (e.g., at least 160, 170, 180, 190, 200, 250, 500, 600, 1000, or 2000 nucleotides in length ) are also encompassed by the invention.

[0143] Moreover, representative examples of polynucleotide fragments of the invention comprise, or alternatively consist of, a sequence from about nucleotide number 1-50, 51-100, 101-150, 151-200, 201-250, 251-300, 301-350, 351-400, 401-450, 451-500, 501-550, 551-600, 601-650, 651-700, 701-750, 751-800, 801-850, 851-900, 901-950, 951-1000, 1001-1050, 1051-1100, 1101-1150, 1151-1200, 1201-1250, 1251-1300, 1301-1350, 1351-1400, 1401-1450, 1451-1500, 1501-1550, 1551-1600, 1601-1650, 1651-1700, 1701-1750, 1751-1800, 1801-1850, 1851-1900, 1901-1950, 1951-2000, 2001-2050, 2051-2100, 2101-2150, 2151-2200, 2201-2250, 2251-2300, 2301-2350, 2351-2400, 2401-2450, 2451-2500, 2501-2550, 2551-2600, 2601-2650, 2651-2700, 2701-2750, 2751-2800, 2801-2850, 2851-2900, 2901-2950, 2951-3000, 3001-3050, 3051-3100, 3101-3150, 3151-3200, 3201-3250, 3251-3300, 3301-3350, 3351-3400, 3401-3450, 3451-3500, 3501-3550, 3551-3600, 3601-3650, 3651-3700, 3701-3750, 3751-3800, 3801-3850, 3851-3900, 3901-3950, 3951-4000, 4001-4050, 4051-4100, 4101-4150, 4151-4200, 4201-4250, 4251-4300, 4301-4350, 4351-4400, 4401-4450, 4451-4500, 4501-4550, 4551-4600, 4601-4650, 4651-4700, 4701-4750, 4751-4800, 4801-4850, 4851-4900, 4901-4950, 4951-5000, 5001-5050, 5051-5100, 5101-5150, 5151-5200, 5201-5250, 5251-5300, 5301-5350, 5351-5400, 5401-5450, 5451-5500, 5501-5550, 5551-5600, 5601-5650, 5651-5700, 5701-5750, 5751-5800, 5801-5850, 5851-5900, 5901-5950, 5951-6000, 6001-6050, 6051-6100, 6101-6150, 6151-6200, 6201-6250, 6251-6300, 6301-6350, 6351-6400, 6401-6450, 6451-6500, 6501-6550, 6551-6600, 6601-6650, 6651-6700, 6701-6750, 6751-6800, 6801-6850, 6851-6900, 6901-6950, 6951-7000, 7001-7050, 7051-7100, 7101-7150, 7151-7200, 7201-7250, 7251-7300 or 7301 to the end of SEQ ID NO:X, or the complementary strand thereto. In this context “about” includes the particularly recited range or a range larger or smaller by several (5, 4, 3, 2, or 1) nucleotides, at either terminus or at both termini. Preferably, these fragments encode a polypeptide which has a functional activity (e.g., biological activity). More preferably, these polynucleotides can be used as probes or primers as discussed herein. Polynucleotides which hybridize to one or more of these polynucleotides under stringent hybridization conditions or alternatively, under lower stringency conditions are also encompassed by the invention, as are polypeptides encoded by these polynucleotides.

[0144] Further representative examples of polynucleotide fragments of the invention comprise, or alternatively consist of, a sequence from about nucleotide number 1-50, 51-100, 101-150, 151-200, 201-250, 251-300, 301-350, 351-400, 401-450, 451-500, 501-550, 551-600, 601-650, 651-700, 701-750, 751-800, 801-850, 851-900, 901-950, 951-1000, 1001-1050, 1051-1100, 1101-1150, 1151-1200, 1201-1250, 1251-1300, 1301-1350, 1351-1400, 1401-1450, 1451-1500, 1501-1550, 1551-1600, 1601-1650, 1651-1700, 1701-1750, 1751-1800, 1801-1850, 1851-1900, 1901-1950, 1951-2000, 2001-2050, 2051-2100, 2101-2150, 2151-2200, 2201-2250, 2251-2300, 2301-2350, 2351-2400, 2401-2450, 2451-2500, 2501-2550, 2551-2600, 2601-2650, 2651-2700, 2701-2750, 2751-2800, 2801-2850, 2851-2900, 2901-2950, 2951-3000, 3001-3050, 3051-3100, 3101-3150, 3151-3200, 3201-3250, 3251-3300, 3301-3350, 3351-3400, 3401-3450, 3451-3500, 3501-3550, 3551-3600, 3601-3650, 3651-3700, 3701-3750, 3751-3800, 3801-3850, 3851-3900, 3901-3950, 3951-4000, 4001-4050, 4051-4100, 4101-4150, 4151-4200, 4201-4250, 4251-4300, 4301-4350, 4351-4400, 4401-4450, 4451-4500, 4501-4550, 4551-4600, 4601-4650, 4651-4700, 4701-4750, 4751-4800, 4801-4850, 4851-4900, 4901-4950, 4951-5000, 5001-5050, 5051-5100, 5101-5150, 5151-5200, 5201-5250, 5251-5300, 5301-5350, 5351-5400, 5401-5450, 5451-5500, 5501-5550, 5551-5600, 5601-5650, 5651-5700, 5701-5750, 5751-5800, 5801-5850, 5851-5900, 5901-5950, 5951-6000, 6001-6050, 6051-6100, 6101-6150, 6151-6200, 6201-6250, 6251-6300, 6301-6350, 6351-6400, 6401-6450, 6451-6500, 6501-6550, 6551-6600, 6601-6650, 6651-6700, 6701-6750, 6751-6800, 6801-6850, 6851-6900, 6901-6950, 6951-7000, 7001-7050, 7051-7100, 7101-7150, 7151-7200, 7201-7250, 7251-7300 or 7301 to the end of the cDNA sequence contained in Clone ID NO:Z, or the complementary strand thereto. In this context “about” includes the particularly recited range or a range larger or smaller by several (5, 4, 3, 2, or 1) nucleotides, at either terminus or at both termini. Preferably, these fragments encode a polypeptide which has a functional activity (e.g., biological activity). More preferably, these polynucleotides can be used as probes or primers as discussed herein. Polynucleotides which hybridize to one or more of these polynucleotides under stringent hybridization conditions or alternatively, under lower stringency conditions are also encompassed by the invention, as are polypeptides encoded by these polynucleotides.

[0145] Moreover, representative examples of polynucleotide fragments of the invention comprise, or alternatively consist of, a nucleic acid sequence comprising one, two, three, four, five, six, seven, eight, nine, ten, or more of the above described polynucleotide fragments of the invention in combination with a polynucleotide sequence delineated in Table 1B column 6. Additional, representative examples of polynucleotide fragments of the invention comprise, or alternatively consist of, a nucleic acid sequence comprising one, two, three, four, five, six, seven, eight, nine, ten, or more of the above described polynucleotide fragments of the invention in combination with a polynucleotide sequence that is the complementary strand of a sequence delineated in column 6 of Table 1B. In further embodiments, the above-described polynucleotide fragments of the invention comprise, or alternatively consist of, sequences delineated in Table 1B, column 6, and have a nucleic acid sequence which is different from that of the BAC fragment having the sequence disclosed in SEQ ID NO:B (see Table 1B, column 5). In additional embodiments, the above-described polynucleotide fragments of the invention comprise, or alternatively consist of, sequences delineated in Table 1B, column 6, and have a nucleic acid sequence which is different from that published for the BAC clone identified as BAC ID NO:A (see Table 1B, column 4). In additional embodiments, the above-described polynucleotides of the invention comprise, or alternatively consist of, sequences delineated Table 1B, column 6, and have a nucleic acid sequence which is different from that contained in the BAC clone identified as BAC ID NO:A (see Table 1B, column 4). Polypeptides encoded by these polynucleotides, other polynucleotides that encode these polypeptides, and antibodies that bind these polypeptides are also encompassed by the invention. Additionally, fragments and variants of the above-described polynucleotides and polypeptides are also encompassed by the invention.

[0146] In additional specific embodiments, polynucleotides of the invention comprise, or alternatively consist of, one, two, three, four, five, six, seven, eight, nine, ten, or more fragments of the sequences delineated in column 6 of Table 1B, and the polynucleotide sequence of SEQ ID NO:X (e.g., as defined in Table 1B, column 2) or fragments or variants thereof. Polypeptides encoded by these polynucleotides, other polynucleotides that encode these polypeptides, and antibodies that bind these polypeptides are also encompassed by the invention.

[0147] In additional specific embodiments, polynucleotides of the invention comprise, or alternatively consist of, one, two, three, four, five, six, seven, eight, nine, ten, or more fragments of the sequences delineated in column 6 of Table 1B which correspond to the same Clone ID NO:Z (see Table 1B, column 1), and the polynucleotide sequence of SEQ ID NO:X (e.g., as defined in Table 1A or 1B) or fragments or variants thereof. Polypeptides encoded by these polynucleotides, other polynucleotides that encode these polypeptides, and antibodies that bind these polypeptides are also encompassed by the invention.

[0148] In further specific embodiments, polynucleotides of the invention comprise, or alternatively consist of, one, two, three, four, five, six, seven, eight, nine, ten, or more fragments of the sequences delineated in the same row of column 6 of Table 1B, and the polynucleotide sequence of SEQ ID NO:X (e.g., as defined in Table 1A or 1B) or fragments or variants thereof. Polypeptides encoded by these polynucleotides, other polynucleotides that encode these polypeptides, and antibodies that bind these polypeptides are also encompassed by the invention.

[0149] In additional specific embodiments, polynucleotides of the invention comprise, or alternatively consist of a polynucleotide sequence in which the 3′ 10 polynucleotides of one of the sequences delineated in column 6 of Table 1B and the 5′ 10 polynucleotides of the sequence of SEQ ID NO:X are directly contiguous. Nucleic acids which hybridize to the complement of these 20 contiguous polynucleotides under stringent hybridization conditions or alternatively, under lower stringency conditions, are also encompassed by the invention. Polypeptides encoded by these polynucleotides and/or nucleic acids, other polynucleotides and/or nucleic acids that encode these polypeptides, and antibodies that bind these polypeptides are also encompassed by the invention. Additionally, fragments and variants of the above-described polynucleotides, nucleic acids, and polypeptides are also encompassed by the invention.

[0150] In additional specific embodiments, polynucleotides of the invention comprise, or alternatively consist of a polynucleotide sequence in which the 3′ 10 polynucleotides of one of the sequences delineated in column 6 of Table 1B and the 5′ 10 polynucleotides of a fragment or variant of the sequence of SEQ ID NO:X (e.g., as described herein) are directly contiguous Nucleic acids which hybridize to the complement of these 20 contiguous polynucleotides under stringent hybridization conditions or alternatively, under lower stringency conditions, are also encompassed by the invention. Polypeptides encoded by these polynucleotides and/or nucleic acids, other polynucleotides and/or nucleic acids encoding these polypeptides, and antibodies that bind these polypeptides are also encompassed by the invention. Additionally, fragments and variants of the above-described polynucleotides, nucleic acids, and polypeptides are also encompassed by the invention.

[0151] In further specific embodiments, polynucleotides of the invention comprise, or alternatively consist of a polynucleotide sequence in which the 3′ 10 polynucleotides of a fragment or variant of the sequence of SEQ ID NO:X and the 5′ 10 polynucleotides of the sequence of one of the sequences delineated in column 6 of Table 1B are directly contiguous. Nucleic acids which hybridize to the complement of these 20 contiguous polynucleotides under stringent hybridization conditions or alternatively, under lower stringency conditions, are also encompassed by the invention. Polypeptides encoded by these polynucleotides and/or nucleic acids, other polynucleotides and/or nucleic acids encoding these polypeptides, and antibodies that bind these polypeptides are also encompassed by the invention. Additionally, fragments and variants of the above-described polynucleotides, nucleic acids, and polypeptides are also encompassed by the invention.

[0152] In specific embodiments, polynucleotides of the invention comprise, or alternatively consist of a polynucleotide sequence in which the 3′ 10 polynucleotides of one of the sequences delineated in column 6 of Table 1B and the 5′ 10 polynucleotides of another sequence in column 6 are directly contiguous. In preferred embodiments, the 3′ 10 polynucleotides of one of the sequences delineated in column 6 of Table 1B is directly contiguous with the 5′ 10 polynucleotides of the next sequential exon delineated in Table 1B, column 6. Nucleic acids which hybridize to the complement of these 20 contiguous polynucleotides under stringent hybridization conditions or alternatively, under lower stringency conditions, are also encompassed by the invention. Polypeptides encoded by these polynucleotides and/or nucleic acids, other polynucleotides and/or nucleic acids encoding these polypeptides, and antibodies that bind these polypeptides are also encompassed by the invention. Additionally, fragments and variants of the above-described polynucleotides, nucleic acids, and polypeptides are also encompassed by the invention.

[0153] In the present invention, a “polypeptide fragment” refers to an amino acid sequence which is a portion of that contained in SEQ ID NO:Y, a portion of an amino acid sequence encoded by the portion of SEQ ID NO:X as defined in columnns 8 and 9 of Table 2, a portion of an amino acid sequence encoded by the polynucleotide sequence of SEQ ID NO:X, a portion of an amino acid sequence encoded by the complement of the polynucleotide sequence in SEQ ID NO:X, and/or a portion of an amino acid sequence encoded by the cDNA contained in Clone ID NO:Z. Protein (polypeptide) fragments may be “free-standing,” or comprised within a larger polypeptide of which the fragment forms a part or region, most preferably as a single continuous region. Representative examples of polypeptide fragments of the invention, include, for example, fragments comprising, or alternatively consisting of, from about amino acid number 1-20, 21-40, 41-60, 61-80, 81-100, 101-120, 121-140, 141-160, 161-180, 181-200, 201-220, 221-240, 241-260, 261-280, 281-300, 301-320, 321-340, 341-360, 361-380, 381-400, 401-420, 421-440, 441-460, 461-480, 481-500, 501-520, 521-540, 541-560, 561-580, 581-600, 601-620, 621-640, 641-660, 661-680, 681-700, 701-720, 721-740, 741-760, 761-780, 781-800, 801-820, 821-840, 841-860, 861-880, 881-900, 901-920, 921-940, 941-960, 961-980, 981-1000, 1001-1020, 1021-1040, 1041-1060, 1061-1080, 1081-1100, 1101-1120, 1121-1140, 1141-1160, 1161-1180, 1181-1200, 1201-1220, 1221-1240, 1241-1260, 1261-1280, 1281-1300, 1301-1320, 1321-1340, 1341-1360, 1361-1380, 1381-1400, 1401-1420, 1421-1440, or 1441 to the end of the coding region of cDNA and SEQ ID NO: Y. In a preferred embodiment, polypeptide fragments of the invention include, for example, fragments comprising, or alternatively consisting of, from about amino acid number 1-20, 21-40, 41-60, 61-80, 81-100, 101-120, 121-140, 141-160, 161-180, 181-200, 201-220, 221-240, 241-260, 261-280, 281-300, 301-320, 321-340, 341-360, 361-380, 381-400, 401-420, 421-440, 441-460, 461-480, 481-500, 501-520, 521-540, 541-560, 561-580, 581-600, 601-620, 621-640, 641-660, 661-680, 681-700, 701-720, 721-740, 741-760, 761-780, 781-800, 801-820, 821-840, 841-860, 861-880, 881-900, 901-920, 921-940, 941-960, 961-980, 981-1000, 1001-1020, 1021-1040, 1041-1060, 1061-1080, 1081-1100, 1101-1120, 1121-1140, 1141-1160, 1161-1180, 1181-1200, 1201-1220, 1221-1240, 1241-1260, 1261-1280, 1281-1300, 1301-1320, 1321-1340, 1341-1360, 1361-1380, 1381-1400, 1401-1420, 1421-1440, or 1441 to the end of the coding region of SEQ ID NO:Y. Moreover, polypeptide fragments of the invention may be at least about 10, 15, 20, 25, 30, 35, 40, 45, 50, 55, 60, 65, 70, 75, 80, 85, 90, 100, 110, 120, 130, 140, or 150 amino acids in length. In this context “about” includes the particularly recited ranges or values, or ranges or values larger or smaller by several (5, 4, 3, 2, or 1) amino acids, at either extreme or at both extremes. Polynucleotides encoding these polypeptide fragments are also encompassed by the invention.

[0154] Even if deletion of one or more amino acids from the N-terminus of a protein results in modification of loss of one or more biological functions of the protein, other functional activities (e.g., biological activities, ability to multimerize, ability to bind a ligand) may still be retained. For example, the ability of shortened muteins to induce and/or bind to antibodies which recognize the complete or mature forms of the polypeptides generally will be retained when less than the majority of the residues of the complete or mature polypeptide are removed from the N-terminus. Whether a particular polypeptide lacking N-terminal residues of a complete polypeptide retains such immunologic activities can readily be determined by routine methods described herein and otherwise known in the art. It is not unlikely that a mutein with a large number of deleted N-terminal amino acid residues may retain some biological or immunogenic activities. In fact, peptides composed of as few as six amino acid residues may often evoke an immune response.

[0155] Accordingly, polypeptide fragments include the secreted protein as well as the mature form. Further preferred polypeptide fragments include the secreted protein or the mature form having a continuous series of deleted residues from the amino or the carboxy terminus, or both. For example, any number of amino acids, ranging from 1-60, can be deleted from the amino terminus of either the secreted polypeptide or the mature form. Similarly, any number of amino acids, ranging from 1-30, can be deleted from the carboxy terminus of the secreted protein or mature form. Furthermore, any combination of the above amino and carboxy terminus deletions are preferred. Similarly, polynucleotides encoding these polypeptide fragments are also preferred.

[0156] The present invention further provides polypeptides having one or more residues deleted from the amino terminus of the amino acid sequence of a polypeptide disclosed herein (e.g., a polypeptide of SEQ ID NO:Y, a polypeptide encoded by the polynucleotide sequence contained in SEQ ID NO:X or the complement thereof, a polypeptide encoded by the portion of SEQ ID NO:X as defined in columns 8 and 9 of Table 2, a polypeptide encoded by the portion of SEQ ID NO:B as defined in column 6 of Table 1B, and/or a polypeptide encoded by the cDNA contained in Clone ID NO:Z). In particular, N-terminal deletions may be described by the general formula m−q, where q is a whole integer representing the total number of amino acid residues in a polypeptide of the invention (e.g., the polypeptide disclosed in SEQ ID NO:Y, or the polypeptide encoded by the portion of SEQ ID NO:X as defined in columns 8 and 9 of Table 2), and m is defined as any integer ranging from 2 to q−6. Polynucleotides encoding these polypeptides are also encompassed by the invention.

[0157] The present invention further provides polypeptides having one or more residues from the carboxy terminus of the amino acid sequence of a polypeptide disclosed herein (e.g., a polypeptide of SEQ ID NO:Y, a polypeptide encoded by the polynucleotide sequence contained in SEQ ID NO:X, a polypeptide encoded by the portion of SEQ ID NO:X as defined in columns 8 and 9 of Table 2, and/or a polypeptide encoded by the cDNA contained in Clone ID NO:Z). In particular, C-terminal deletions may be described by the general formula 1−n, where n is any whole integer ranging from 6 to q−1, and where n corresponds to the position of amino acid residue in a polypeptide of the invention. Polynucleotides encoding these polypeptides are also encompassed by the invention.

[0158] In addition, any of the above described N- or C-terminal deletions can be combined to produce a N- and C-terminal deleted polypeptide. The invention also provides polypeptides having one or more amino acids deleted from both the amino and the carboxyl termini, which may be described generally as having residues m−n of a polypeptide encoded by SEQ ID NO:X (e.g., including, but not limited to, the preferred polypeptide disclosed as SEQ ID NO:Y and the polypeptide encoded by the portion of SEQ ID NO:X as defined in columns 8 and 9 of Table 2), the cDNA contained in Clone ID NO:Z, and/or the complement thereof, where n and m are integers as described above. Polynucleotides encoding these polypeptides are also encompassed by the invention.

[0159] Also as mentioned above, even if deletion of one or more amino acids from the C-terninus of a protein results in modification of loss of one or more biological functions of the protein, other functional activities (e.g., biological activities, ability to multimerize, ability to bind a ligand) may still be retained. For example the ability of the shortened mutein to induce and/or bind to antibodies which recognize the complete or mature forms of the polypeptide generally will be retained when less than the majority of the residues of the complete or mature polypeptide are removed from the C-terminus. Whether a particular polypeptide lacking C-terminal residues of a complete polypeptide retains such immunologic activities can readily be determined by routine methods described herein and otherwise known in the art. It is not unlikely that a mutein with a large number of deleted C-terminal amino acid residues may retain some biological or immunogenic activities. In fact, peptides composed of as few as six amino acid residues may often evoke an immune response.

[0160] The present application is also directed to proteins containing polypeptides at least 80%, 85%, 90%, 95%, 96%, 97%, 98% or 99% identical to a polypeptide sequence set forth herein. In preferred embodiments, the application is directed to proteins containing polypeptides at least 80%, 85%, 90%, 95%, 96%, 97%, 98% or 99% identical to polypeptides having the amino acid sequence of the specific N- and C-terminal deletions. Polynucleotides encoding these polypeptides are also encompassed by the invention.

[0161] Any polypeptide sequence encoded by, for example, the polynucleotide sequences set forth as SEQ ID NO:X or the complement thereof, (presented, for example, in Tables 1A and 2), the cDNA contained in Clone ID NO:Z, or the polynucleotide sequence as defined in column 6 of Table 1B, may be analyzed to determine certain preferred regions of the polypeptide. For example, the amino acid sequence of a polypeptide encoded by a polynucleotide sequence of SEQ ID NO:X (e.g., the polypeptide of SEQ ID NO:Y and the polypeptide encoded by the portion of SEQ ID NO:X as defined in columnns 8 and 9 of Table 2) or the cDNA contained in Clone ID NO:Z may be analyzed using the default parameters of the DNASTAR computer algorithm (DNASTAR, Inc., 1228 S. Park St., Madison, Wis. 53715 USA; http://www.dnastar.com/).

[0162] Polypeptide regions that may be routinely obtained using the DNASTAR computer algorithm include, but are not limited to, Garnier-Robson alpha-regions, beta-regions, turn-regions, and coil-regions; Chou-Fasman alpha-regions, beta-regions, and turn-regions; Kyte-Doolittle hydrophilic regions and hydrophobic regions; Eisenberg alpha- and beta-amphipathic regions; Karplus-Schulz flexible regions; Emini surface-forming regions; and Jameson-Wolf regions of high antigenic index. Among highly preferred polynucleotides of the invention in this regard are those that encode polypeptides comprising regions that combine several structural features, such as several (e.g., 1, 2, 3 or 4) of the features set out above.

[0163] Additionally, Kyte-Doolittle hydrophilic regions and hydrophobic regions, Emini surface-forming regions, and Jameson-Wolf regions of high antigenic index (i.e., containing four or more contiguous amino acids having an antigenic index of greater than or equal to 1.5, as identified using the default parameters of the Jameson-Wolf program) can routinely be used to determine polypeptide regions that exhibit a high degree of potential for antigenicity. Regions of high antigenicity are determined from data by DNASTAR analysis by choosing values which represent regions of the polypeptide which are likely to be exposed on the surface of the polypeptide in an environment in which antigen recognition may occur in the process of initiation of an immune response.

[0164] Preferred polypeptide fragments of the invention are fragments comprising, or alternatively, consisting of, an amino acid sequence that displays a functional activity (e.g. biological activity) of the polypeptide sequence of which the amino acid sequence is a fragment. By a polypeptide displaying a “functional activity” is meant a polypeptide capable of one or more known functional activities associated with a full-length protein, such as, for example, biological activity, antigenicity, immunogenicity, and/or multimerization, as described herein.

[0165] Other preferred polypeptide fragments are biologically active fragments. Biologically active fragments are those exhibiting activity similar, but not necessarily identical, to an activity of the polypeptide of the present invention. The biological activity of the fragments may include an improved desired activity, or a decreased undesirable activity.

[0166] In preferred embodiments, polypeptides of the invention comprise, or alternatively consist of, one, two, three, four, five or more of the antigenic fragments of the polypeptide of SEQ ID NO:Y, or portions thereof. Polynucleotides encoding these polypeptides are also encompassed by the invention.

[0167] The present invention encompasses polypeptides comprising, or alternatively consisting of, an epitope of: the polypeptide sequence shown in SEQ ID NO:Y; a polypeptide sequence encoded by SEQ ID NO:X or the complementary strand thereto; the polypeptide sequence encoded by the portion of SEQ ID NO:X as defined in columns 8 and 9 of Table 2; the polypeptide sequence encoded by the portion of SEQ ID NO:B as defined in column 6 of Table 1B or the complement thereto; the polypeptide sequence encoded by the cDNA contained in Clone ID NO:Z; or the polypeptide sequence encoded by a polynucleotide that hybridizes to the sequence of SEQ ID NO:X, the complement of the sequence of SEQ ID NO:X, the complement of a portion of SEQ ID NO:X as defined in columns 8 and 9 of Table 2, or the cDNA sequence contained in Clone ID NO:Z under stringent hybridization conditions or alternatively, under lower stringency hybridization as defined supra. The present invention further encompasses polynucleotide sequences encoding an epitope of a polypeptide sequence of the invention (such as, for example, the sequence disclosed in SEQ ID NO:X, or a fragment thereof), polynucleotide sequences of the complementary strand of a polynucleotide sequence encoding an epitope of the invention, and polynucleotide sequences which hybridize to the complementary strand under stringent hybridization conditions or alternatively, under lower stringency hybridization conditions defined supra.

[0168] The term “epitopes,” as used herein, refers to portions of a polypeptide having antigenic or immunogenic activity in an animal, preferably a mammal, and most preferably in a human. In a preferred embodiment, the present invention encompasses a polypeptide comprising an epitope, as well as the polynucleotide encoding this polypeptide. An “immunogenic epitope,” as used herein, is defined as a portion of a protein that elicits an antibody response in an animal, as determined by any method known in the art, for example, by the methods for generating antibodies described infra. (See, for example, Geysen et al., Proc. Natl. Acad. Sci. USA 81:3998-4002 (1983)). The term “antigenic epitope,” as used herein, is defined as a portion of a protein to which an antibody can immunospecifically bind its antigen as determined by any method well known in the art, for example, by the immunoassays described herein. Immunospecific binding excludes non-specific binding but does not necessarily exclude cross- reactivity with other antigens. Antigenic epitopes need not necessarily be immunogenic.

[0169] Fragments which function as epitopes may be produced by any conventional means. (See, e.g., Houghten, R. A., Proc. Natl. Acad. Sci. USA 82:5131-5135 (1985) further described in U.S. Pat. No. 4,631,211.)

[0170] In the present invention, antigenic epitopes preferably contain a sequence of at least 4, at least 5, at least 6, at least 7, more preferably at least 8, at least 9, at least 10, at least 11, at least 12, at least 13, at least 14, at least 15, at least 20, at least 25, at least 30, at least 40, at least 50, and, most preferably, between about 15 to about 30 amino acids. Preferred polypeptides comprising immunogenic or antigenic epitopes are at least 10, 15, 20, 25, 30, 35, 40, 45, 50, 55, 60, 65, 70, 75, 80, 85, 90, 95, or 100 amino acid residues in length. Additional non-exclusive preferred antigenic epitopes include the antigenic epitopes disclosed herein, as well as portions thereof. Antigenic epitopes are useful, for example, to raise antibodies, including monoclonal antibodies, that specifically bind the epitope. Preferred antigenic epitopes include the antigenic epitopes disclosed herein, as well as any combination of two, three, four, five or more of these antigenic epitopes. Antigenic epitopes can be used as the target molecules in immunoassays. (See, for instance, Wilson et al., Cell 37:767-778 (1984); Sutcliffe et al., Science 219:660-666 (1983)).

[0171] Non-limiting examples of epitopes of polypeptides that can be used to generate antibodies of the invention include a polypeptide comprising, or alternatively consisting of, at least one, two, three, four, five, six or more of the portion(s) of SEQ ID NO:Y specified in column 7 of Table 1 A. These polypeptide fragments have been determined to bear antigenic epitopes of the proteins of the invention by the analysis of the Jameson-Wolf antigenic index which is included in the DNAStar suite of computer programs. By “comprise” it is intended that a polypeptide contains at least one, two, three, four, five, six or more of the portion(s) of SEQ ID NO:Y shown in column 7 of Table 1A, but it may contain additional flanking residues on either the amino or carboxyl termini of the recited portion. Such additional flanking sequences are preferably sequences naturally found adjacent to the portion; i.e., contiguous sequence shown in SEQ ID NO:Y. The flanking sequence may, however, be sequences from a heterolgous polypeptide, such as from another protein described herein or from a heterologous polypeptide not described herein. In particular embodiments, epitope portions of a polypeptide of the invention comprise one, two, three, or more of the portions of SEQ ID NO:Y shown in column 7 of Table 1A.

[0172] Similarly, immunogenic epitopes can be used, for example, to induce antibodies according to methods well known in the art. See, for instance, Sutcliffe et al., supra; Wilson et al., supra; Chow et al., Proc. Natl. Acad. Sci. USA 82:910-914; and Bittle et al., J. Gen. Virol. 66:2347-2354 (1985). Preferred immunogenic epitopes include the immunogenic epitopes disclosed herein, as well as any combination of two, three, four, five or more of these immunogenic epitopes. The polypeptides comprising one or more immunogenic epitopes may be presented for eliciting an antibody response together with a carrier protein, such as an albumin, to an animal system (such as rabbit or mouse), or, if the polypeptide is of sufficient length (at least about 25 amino acids), the polypeptide may be presented without a carrier. However, immunogenic epitopes comprising as few as 8 to 10 amino acids have been shown to be sufficient to raise antibodies capable of binding to, at the very least, linear epitopes in a denatured polypeptide (e.g., in Western blotting).

[0173] Epitope-bearing polypeptides of the present invention may be used to induce antibodies according to methods well known in the art including, but not limited to, in vivo immunization, in vitro immunization, and phage display methods. See, e.g., Sutcliffe et al., supra; Wilson et al., supra, and Bittle et al., J. Gen. Virol., 66:2347-2354 (1985). If in vivo immunization is used, animals may be immunized with free peptide; however, anti-peptide antibody titer may be boosted by coupling the peptide to a macromolecular carrier, such as keyhole limpet hemacyanin (KLH) or tetanus toxoid. For instance, peptides containing cysteine residues may be coupled to a carrier using a linker such as maleimidobenzoyl-N-hydroxysuccinimide ester (MBS), while other peptides may be coupled to carriers using a more general linking agent such as glutaraldehyde. Animals such as rabbits, rats and mice are immunized with either free or carrier- coupled peptides, for instance, by intraperitoneal and/or intradermal injection of emulsions containing about 100 μg of peptide or carrier protein and Freund's adjuvant or any other adjuvant known for stimulating an immune response. Several booster injections may be needed, for instance, at intervals of about two weeks, to provide a useful titer of anti-peptide antibody which can be detected, for example, by ELISA assay using free peptide adsorbed to a solid surface. The titer of anti-peptide antibodies in serun from an immunized animal may be increased by selection of anti-peptide antibodies, for instance, by adsorption to the peptide on a solid support and elution of the selected antibodies according to methods well known in the art.

[0174] As one of skill in the art will appreciate, and as discussed above, the polypeptides of the present invention (e.g., those comprising an immunogenic or antigenic epitope) can be fused to heterologous polypeptide sequences. For example, polypeptides of the present invention (including fragments or variants thereof), may be fused with the constant domain of immunoglobulins (IgA, IgE, IgG, IgM), or portions thereof (CH1, CH2, CH3, or any combination thereof and portions thereof, resulting in chimeric polypeptides. By way of another non-limiting example, polypeptides and/or antibodies of the present invention (including fragments or variants thereof) may be fused with albumin (including but not limited to recombinant human serum albumin or fragments or variants thereof (see, e.g., U.S. Pat. No. 5,876,969, issued Mar. 2, 1999, EP Patent 0 413 622, and U.S. Pat. No. 5,766,883, issued Jun. 16, 1998, herein incorporated by reference in their entirety)). In a preferred embodiment, polypeptides and/or antibodies of the present invention (including fragments or variants thereof) are fused with the mature form of human serum albumin (i.e., amino acids 1-585 of human serum albumin as shown in FIGS. 1and 2of EP Patent 0 322 094) which is herein incorporated by reference in its entirety. In another preferred embodiment, polypeptides and/or antibodies of the present invention (including fragments or variants thereof) are fused with polypeptide fragments comprising, or alternatively consisting of, amino acid residues 1−z of human serum albumin, where z is an integer from 369 to 419, as described in U.S. Pat. No. 5,766,883 herein incorporated by reference in its entirety. Polypeptides and/or antibodies of the present invention (including fragments or variants thereof) may be fused to either the N- or C-terminal end of the heterologous protein (e.g., immunoglobulin Fc polypeptide or human serum albumin polypeptide). Polynucleotides encoding fusion proteins of the invention are also encompassed by the invention.

[0175] Such fusion proteins as those described above may facilitate purification and may increase half-life in vivo. This has been shown for chimeric proteins consisting of the first two domains of the human CD4-polypeptide and various domains of the constant regions of the heavy or light chains of mammalian immunoglobulins. See, e.g., EP 394,827; Traunecker et al., Nature, 331:84-86 (1988). Enhanced delivery of an antigen across the epithelial barrier to the immune system has been demonstrated for antigens (e.g., insulin) conjugated to an FcRn binding partner such as IgG or Fc fragments (see, e.g., PCT Publications WO 96/22024 and WO 99/04813). IgG fusion proteins that have a disulfide-linked dimeric structure due to the IgG portion desulfide bonds have also been found to be more efficient in binding and neutralizing other molecules than monomeric polypeptides or fragments thereof alone. See, e.g., Fountoulakis et al., J. Biochem., 270:3958-3964 (1995). Nucleic acids encoding the above epitopes can also be recombined with a gene of interest as an epitope tag (e.g., the hemagglutinin (HA) tag or flag tag) to aid in detection and purification of the expressed polypeptide. For example, a system described by Janknecht et al. allows for the ready purification of non-denatured fusion proteins expressed in human cell lines (Janknecht et al., 1991, Proc. Natl. Acad. Sci. USA 88:8972-897). In this system, the gene of interest is subeloned into a vaccinia recombination plasmid such that the open reading frame of the gene is translationally fused to an amino-terminal tag consisting of six histidine residues. The tag serves as a matrix binding domain for the fusion protein. Extracts from cells infected with the recombinant vaccinia virus are loaded onto Ni2+ nitriloacetic acid-agarose column and histidine-tagged proteins can be selectively eluted with imidazole-containing buffers.

[0176] Fusion Proteins

[0177] Any polypeptide of the present invention can be used to generate fusion proteins. For example, the polypeptide of the present invention, when fused to a second protein, can be used as an antigenic tag. Antibodies raised against the polypeptide of the present invention can be used to indirectly detect the second protein by binding to the polypeptide. Moreover, because secreted proteins target cellular locations based on trafficking signals, polypeptides of the present invention which are shown to be secreted can be used as targeting molecules once fused to other proteins.

[0178] Examples of domains that can be fused to polypeptides of the present invention include not only heterologous signal sequences, but also other heterologous functional regions. The fusion does not necessarily need to be direct, but may occur through linker sequences.

[0179] In certain preferred embodiments, proteins of the invention are fusion proteins comprising an amino acid sequence that is an N and/or C- terminal deletion of a polypeptide of the invention. In preferred embodiments, the invention is directed to a fusion protein comprising an amino acid sequence that is at least 90%, 95%, 96%, 97%, 98% or 99% identical to a polypeptide sequence of the invention. Polynucleotides encoding these proteins are also encompassed by the invention.

[0180] Moreover, fusion proteins may also be engineered to improve characteristics of the polypeptide of the present invention. For instance, a region of additional amino acids, particularly charged amino acids, may be added to the N-terminus of the polypeptide to improve stability and persistence during purification from the host cell or subsequent handling and storage. Also, peptide moieties may be added to the polypeptide to facilitate purification. Such regions may be removed prior to final preparation of the polypeptide. The addition of peptide moieties to facilitate handling of polypeptides are familiar and routine techniques in the art.

[0181] As one of skill in the art will appreciate that, as discussed above, polypeptides of the present invention, and epitope-bearing fragments thereof, can be combined with heterologous polypeptide sequences. For example, the polypeptides of the present invention may be fused with heterologous polypeptide sequences, for example, the polypeptides of the present invention may be fused with the constant domain of immunoglobulins (IgA, IgE, IgG, IgM) or portions thereof (CH1, CH2, CH3, and any combination thereof, including both entire domains and portions thereof), or albumin (including, but not limited to, native or recombinant human albumin or fragments or variants thereof (see, e.g., U.S. Pat. No. 5,876,969, issued Mar. 2, 1999, EP Patent 0 413 622, and U.S. Pat. No. 5,766,883, issued Jun. 16, 1998, herein incorporated by reference in their entirety)), resulting in chimeric polypeptides. For example, EP-A-O 464 533 (Canadian counterpart 2045869) discloses fusion proteins comprising various portions of constant region of immunoglobulin molecules together with another human protein or part thereof. In many cases, the Fc part in a fusion protein is beneficial in therapy and diagnosis, and thus can result in, for example, improved pharmacokinetic properties (EP-A 0232 262). Alternatively, deleting the Fc part after the fusion protein has been expressed, detected, and purified, would be desired. For example, the Fc portion may hinder therapy and diagnosis if the fusion protein is used as an antigen for immunizations. In drug discovery, for example, human proteins, such as hIL-5, have been fused with Fc portions for the purpose of high-throughput screening assays to identify antagonists of hIL-5. See, D. Bennett et al., J. Molecular Recognition 8:52-58 (1995); K. Johanson et al., J. Biol. Chem. 270:9459-9471 (1995).

[0182] Moreover, the polypeptides of the present invention can be fused to marker sequences, such as a polypeptide which facilitates purification of the fused polypeptide. In preferred embodiments, the marker amino acid sequence is a hexa-histidine peptide, such as the tag provided in a pQE vector (QIAGEN, Inc., 9259 Eton Avenue, Chatsworth, Calif., 91311), among others, many of which are commercially available. As described in Gentz et al., Proc. Natl. Acad. Sci. USA 86:821-824 (1989), for instance, hexa-histidine provides for convenient purification of the fusion protein. Another peptide tag useful for purification, the “HA” tag, corresponds to an epitope derived from the influenza hemagglutinin protein (Wilson et al., Cell 37:767 (1984)).

[0183] Additional fusion proteins of the invention may be generated through the techniques of gene-shuffling, motif-shuffling, exon-shuffling, and/or codon-shuffling (collectively referred to as “DNA shuffling”). DNA shuffling may be employed to modulate the activities of polypeptides of the invention, such methods can be used to generate polypeptides with altered activity, as well as agonists and antagonists of the polypeptides. See, generally, U.S. Pat. Nos. 5,605,793; 5,811,238; 5,830,721; 5,834,252; and 5,837,458, and Patten et al., Curr. Opinion Biotechnol. 8:724-33 (1997); Harayama, Trends Biotechnol. 16(2):76-82 (1998); Hansson, et al., J. Mol. Biol. 287:265-76 (1999); and Lorenzo and Blasco, Biotechniques 24(2):308- 13 (1998) (each of these patents and publications are hereby incorporated by reference in its entirety). In one embodiment, alteration of polynucleotides corresponding to SEQ ID NO:X and the polypeptides encoded by these polynucleotides may be achieved by DNA shuffling. DNA shuffling involves the assembly of two or more DNA segments by homologous or site-specific recombination to generate variation in the polynucleotide sequence. In another embodiment, polynucleotides of the invention, or the encoded polypeptides, may be altered by being subjected to random mutagenesis by error-prone PCR, random nucleotide insertion or other methods prior to recombination. In another embodiment, one or more components, motifs, sections, parts, domains, fragments, etc., of a polynucleotide encoding a polypeptide of the invention may be recombined with one or more components, motifs, sections, parts, domains, fragments, etc. of one or more heterologous molecules.

[0184] Thus, any of these above fusions can be engineered using the polynucleotides or the polypeptides of the present invention.

[0185] Recombinant and Synthetic Production of Polypeptides of the Invention

[0186] The present invention also relates to vectors containing the polynucleotide of the present invention, host cells, and the production of polypeptides by synthetic and recombinant techniques. The vector may be, for example, a phage, plasmid, viral, or retroviral vector. Retroviral vectors may be replication competent or replication defective. In the latter case, viral propagation generally will occur only in complementing host cells.

[0187] The polynucleotides of the invention may be joined to a vector containing a selectable marker for propagation in a host. Generally, a plasmid vector is introduced in a precipitate, such as a calcium phosphate precipitate, or in a complex with a charged lipid. If the vector is a virus, it may be packaged in vitro using an appropriate packaging cell line and then transduced into host cells.

[0188] The polynucleotide insert should be operatively linked to an appropriate promoter, such as the phage lambda PL promoter, the E. coli lac, trp, phoA and tac promoters, the SV40 early and late promoters and promoters of retroviral LTRs, to name a few. Other suitable promoters will be known to the skilled artisan. The expression constructs will further contain sites for transcription initiation, termination, and, in the transcribed region, a ribosome binding site for translation. The coding portion of the transcripts expressed by the constructs will preferably include a translation initiating codon at the beginning and a termination codon (UAA, UGA or UAG) appropriately positioned at the end of the polypeptide to be translated.

[0189] As indicated, the expression vectors will preferably include at least one selectable marker. Such markers include dihydrofolate reductase, G418, glutamine synthase, or neomycin resistance for eukaryotic cell culture, and tetracycline, kanamycin or ampicillin resistance genes for culturing in E. coli and other bacteria. Representative examples of appropriate hosts include, but are not limited to, bacterial cells, such as E. coli, Streptomyces and Salmonella typhimurium cells; fungal cells, such as yeast cells (e.g., Saccharomyces cerevisiae or Pichia pastoris (ATCC Accession No. 201178)); insect cells such as Drosophila S2 and Spodoptera Sf9 cells; animal cells such as CHO, COS, 293, and Bowes melanoma cells; and plant cells. Appropriate culture mediums and conditions for the above-described host cells are known in the art.

[0190] Among vectors preferred for use in bacteria include pQE70, pQE60 and pQE-9, available from QIAGEN, Inc.; pBluescript vectors, Phagescript vectors, pNH8A, pNH16a, pNH18A, pNH46A, available from Stratagene Cloning Systems, Inc.; and ptrc99a, pKK223-3, pKK233-3, pDR540, pRIT5 available from Pharmacia Biotech, Inc. Among preferred eukaryotic vectors are pWLNEO, pSV2CAT, pOG44, pXT1 and pSG available from Stratagene; and pSVK3, pBPV, pMSG and pSVL available from Pharmacia. Preferred expression vectors for use in yeast systems include, but are not limited to pYES2, pYD1, pTEF1/Zeo, pYES2/GS, pPICZ, pGAPZ, pGAPZalph, pPIC9, pPIC3.5, pHIL-D2, pHIL-Si, pPIC3.5K, pPIC9K, and PA0815 (all available from Invitrogen, Carlbad, Calif.). Other suitable vectors will be readily apparent to the skilled artisan.

[0191] Vectors which use glutamine synthase (GS) or DHFR as the selectable markers can be amplified in the presence of the drugs methionine sulphoximine or methotrexate, respectively. An advantage of glutamine synthase based vectors are the availabilty of cell lines (e.g., the murine myeloma cell line, NSO) which are glutamine synthase negative. Glutamine synthase expression systems can also function in glutamine synthase expressing cells (e.g., Chinese Hamster Ovary (CHO) cells) by providing additional inhibitor to prevent the functioning of the endogenous gene. A glutamine synthase expression system and components thereof are detailed in PCT publications: WO87/04462; WO86/05807; WO89/01036; WO89/10404; and WO91/06657, which are hereby incorporated in their entireties by reference herein. Additionally, glutamine synthase expression vectors can be obtained from Lonza Biologics, Inc. (Portsmouth, N.H.). Expression and production of monoclonal antibodies using a GS expression system in murine myeloma cells is described in Bebbington et al., Bio/technology 10:169(1992) and in Biblia and Robinson Biotechnol. Prog. 11:1 (1995) which are herein incorporated by reference.

[0192] The present invention also relates to host cells containing the above-described vector constructs described herein, and additionally encompasses host cells containing nucleotide sequences of the invention that are operably associated with one or more heterologous control regions (e.g., promoter and/or enhancer) using techniques known of in the art. The host cell can be a higher eukaryotic cell, such as a mammalian cell (e.g., a human derived cell), or a lower eukaryotic cell, such as a yeast cell, or the host cell can be a prokaryotic cell, such as a bacterial cell. A host strain may be chosen which modulates the expression of the inserted gene sequences, or modifies and processes the gene product in the specific fashion desired. Expression from certain promoters can be elevated in the presence of certain inducers; thus expression of the genetically engineered polypeptide may be controlled. Furthermore, different host cells have characteristics and specific mechanisms for the translational and post-translational processing and modification (e.g., phosphorylation, cleavage) of proteins. Appropriate cell lines can be chosen to ensure the desired modifications and processing of the foreign protein expressed.

[0193] Introduction of the nucleic acids and nucleic acid constructs of the invention into the host cell can be effected by calcium phosphate transfection, DEAE-dextran mediated transfection, cationic lipid-mediated transfection, electroporation, transduction, infection, or other methods. Such methods are described in many standard laboratory manuals, such as Davis et al., Basic Methods In Molecular Biology (1986). It is specifically contemplated that the polypeptides of the present invention may in fact be expressed by a host cell lacking a recombinant vector.

[0194] In addition to encompassing host cells containing the vector constructs discussed herein, the invention also encompasses primary, secondary, and immortalized host cells of vertebrate origin, particularly mammalian origin, that have been engineered to delete or replace endogenous genetic material (e.g., the coding sequence), and/or to include genetic material (e.g., heterologous polynucleotide sequences) that is operably associated with polynucleotides of the invention, and which activates, alters, and/or amplifies endogenous polynucleotides. For example, techniques known in the art may be used to operably associate heterologous control regions (e.g., promoter and/or enhancer) and endogenous polynucleotide sequences via homologous recombination (see, e.g., U.S. Pat. No. 5,641,670, issued Jun. 24, 1997; International Publication Number WO 96/29411; International Publication Number WO 94/12650; Koller et al., Proc. Natl. Acad. Sci. USA 86:8932-8935 (1989); and Zijlstra et al., Nature 342:435-438 (1989), the disclosures of each of which are incorporated by reference in their entireties).

[0195] Polypeptides of the invention can be recovered and purified from recombinant cell cultures by well-known methods including ammonium sulfate or ethanol precipitation, acid extraction, anion or cation exchange chromatography, phosphocellulose chromatography, hydrophobic interaction chromatography, affinity chromatography, hydroxylapatite chromatography and lectin chromatography. Most preferably, high performance liquid chromatography (“HPLC”) is employed for purification.

[0196] Polypeptides of the present invention can also be recovered from: products purified from natural sources, including bodily fluids, tissues and cells, whether directly isolated or cultured; products of chemical synthetic procedures; and products produced by recombinant techniques from a prokaryotic or eukaryotic host, including, for example, bacterial, yeast, higher plant, insect, and mammalian cells. Depending upon the host employed in a recombinant production procedure, the polypeptides of the present invention may be glycosylated or may be non-glycosylated. In addition, polypeptides of the invention may also include an initial modified methionine residue, in some cases as a result of host-mediated processes. Thus, it is well known in the art that the N-terminal methionine encoded by the translation initiation codon generally is removed with high efficiency from any protein after translation in all eukaryotic cells. While the N-terminal methionine on most proteins also is efficiently removed in most prokaryotes, for some proteins, this prokaryotic removal process is inefficient, depending on the nature of the amino acid to which the N-terminal methionine is covalently linked.

[0197] In one embodiment, the yeast Pichia pastoris is used to express polypeptides of the invention in a eukaryotic system. Pichia pastoris is a methylotrophic yeast which can metabolize methanol as its sole carbon source. A main step in the methanol metabolization pathway is the oxidation of methanol to formaldehyde using 02. This reaction is catalyzed by the enzyme alcohol oxidase. In order to metabolize methanol as its sole carbon source, Pichia pastoris must generate high levels of alcohol oxidase due, in part, to the relatively low affinity of alcohol oxidase for O₂. Consequently, in a growth medium depending on methanol as a main carbon source, the promoter region of one of the two alcohol oxidase genes (AOX1) is highly active. In the presence of methanol, alcohol oxidase produced from the AOX1 gene comprises up to approximately 30% of the total soluble protein in Pichia pastoris. See Ellis, S. B., et al., Mol. Cell. Biol. 5:1111-21 (1985); Koutz, P. J, et al., Yeast 5:167-77 (1989); Tschopp, J. F., et al., Nucl. Acids Res. 15:3859-76 (1987). Thus, a heterologous coding sequence, such as, for example, a polynucleotide of the present invention, under the transcriptional regulation of all or part of the AOX1 regulatory sequence is expressed at exceptionally high levels in Pichia yeast grown in the presence of methanol.

[0198] In one example, the plasmid vector pPIC9K is used to express DNA encoding a polypeptide of the invention, as set forth herein, in a Pichea yeast system essentially as described in “Pichia Protocols: Methods in Molecular Biology,” D.R. Higgins and J. Cregg, eds. The Humana Press, Totowa, N.J., 1998. This expression vector allows expression and secretion of a polypeptide of the invention by virtue of the strong AOX1 promoter linked to the Pichia pastoris alkaline phosphatase (PHO) secretory signal peptide (i.e., leader) located upstream of a multiple cloning site.

[0199] Many other yeast vectors could be used in place of pPIC9K, such as, pYES2, pYD1, pTEF1/Zeo, pYES2/GS, pPICZ, pGAPZ, pGAPZalpha, pPIC9, pPIC3.5, pHIL-D2, pHIL-S1, pPIC3.5K, and PAO815, as one skilled in the art would readily appreciate, as long as the proposed expression construct provides appropriately located signals for transcription, translation, secretion (if desired), and the like, including an in-frame AUG as required.

[0200] In another embodiment, high-level expression of a heterologous coding sequence, such as, for example, a polynucleotide of the present invention, may be achieved by cloning the heterologous polynucleotide of the invention into an expression vector such as, for example, pGAPZ or pGAPZalpha, and growing the yeast culture in the absence of methanol.

[0201] In addition to encompassing host cells containing the vector constructs discussed herein, the invention also encompasses primary, secondary, and immortalized host cells of vertebrate origin, particularly mammalian origin, that have been engineered to delete or replace endogenous genetic material (e.g., coding sequence), and/or to include genetic material (e.g., heterologous polynucleotide sequences) that is operably associated with polynucleotides of the invention, and which activates, alters, and/or amplifies endogenous polynucleotides. For example, techniques known in the art may be used to operably associate heterologous control regions (e.g., promoter and/or enhancer) and endogenous polynucleotide sequences via homologous recombination (see, e.g., U.S. Pat. No. 5,641,670, issued Jun. 24, 1997; International Publication No. WO 96/29411, published Sep. 26, 1996; International Publication No. WO 94/12650, published Aug. 4, 1994; Koller et al., Proc. Natl. Acad. Sci. USA 86:8932-8935 (1989); and Zijlstra et al., Nature 342:435-438 (1989), the disclosures of each of which are incorporated by reference in their entireties).

[0202] In addition, polypeptides of the invention can be chemically synthesized using techniques known in the art (e.g., see Creighton, 1983, Proteins: Structures and Molecular Principles, W.H. Freeman & Co., N.Y., and Hunkapiller et al., Nature, 310:105-111 (1984)). For example, a polypeptide corresponding to a fragment of a polypeptide can be synthesized by use of a peptide synthesizer. Furthermore, if desired, nonclassical amino acids or chemical amino acid analogs can be introduced as a substitution or addition into the polypeptide sequence. Non-classical amino acids include, but are not limited to, to the D-isomers of the common amino acids, 2,4-diaminobutyric acid, a-amino isobutyric acid, 4-aminobutyric acid, Abu, 2-amino butyric acid, g-Abu, e-Ahx, 6-amino hexanoic acid, Aib, 2-amino isobutyric acid, 3-amino propionic acid, ornithine, norleucine, norvaline, hydroxyproline, sarcosine, citrulline, homocitrulline, cysteic acid, t-butylglycine, t-butylalanine, phenylglycine, cyclohexylalanine, b-alanine, fluoro-amino acids, designer amino acids such as b-methyl amino acids, Ca-methyl amino acids, Na-methyl amino acids, and amino acid analogs in general. Furthermore, the amino acid can be D (dextrorotary) or L (levorotary).

[0203] The invention encompasses polypeptides of the present invention which are differentially modified during or after translation, e.g., by glycosylation, acetylation, phosphorylation, amidation, derivatization by known protecting/blocking groups, proteolytic cleavage, linkage to an antibody molecule or other cellular ligand, etc. Any of numerous chemical modifications may be carried out by known techniques, including but not limited, to specific chemical cleavage by cyanogen bromide, trypsin, chymotrypsin, papain, V8 protease, NaBH₄; acetylation, formylation, oxidation, reduction; metabolic synthesis in the presence of tunicamycin; etc.

[0204] Additional post-translational modifications encompassed by the invention include, for example, e.g., N-linked or O-linked carbohydrate chains, processing of N-terminal or C-terminal ends), attachment of chemical moieties to the amino acid backbone, chemical modifications of N-linked or O-linked carbohydrate chains, and addition or deletion of an N-terminal methionine residue as a result of procaryotic host cell expression. The polypeptides may also be modified with a detectable label, such as an enzymatic, fluorescent, isotopic or affinity label to allow for detection and isolation of the protein.

[0205] Examples of suitable enzymes include horseradish peroxidase, alkaline phosphatase, beta-galactosidase, or acetylcholinesterase; examples of suitable prosthetic group complexes include streptavidin/biotin and avidin/biotin; examples of suitable fluorescent materials include umbelliferone, fluorescein, fluorescein isothiocyanate, rhodamine, dichlorotriazinylamine fluorescein, dansyl chloride or phycoerythrin; an example of a luminescent material includes luminol; examples of bioluminescent materials include luciferase, luciferin, and aequorin; and examples of suitable radioactive material include iodine (¹²¹I, ¹²³I, ¹²⁵I, ¹³¹I), carbon (¹⁴C), sulfur (³⁵S), tritium (³H), indium (¹¹¹In, ¹¹²In, ^{113m}In, ¹¹⁵In), technetium (⁹⁹Tc, ^{99m}Tc), thallium (²⁰¹Ti), gallium (⁶⁸Ga, ⁶⁷Ga), palladium (¹⁰³Pd), molybdenum (⁹⁹Mo), xenon (¹³³Xe), fluorine (¹⁸F), ¹⁵³Sm, ¹⁷⁷Lu, ¹⁵⁹Gd, ¹⁴⁹Pm, ¹⁴⁰La, ¹⁷⁵Yb, ¹⁶⁶Ho, ⁹⁰Y ⁴⁷Sc, ¹⁸⁶Re, ¹⁸⁸Re, ¹⁴²Pr, ¹⁰⁵Rh, and ⁹⁷Ru

[0206] In specific embodiments, a polypeptide of the present invention or fragment or variant thereof is attached to macrocyclic chelators that associate with radiometal ions, including but not limited to, ¹⁷⁷Lu, ⁹⁰y, ¹⁶⁶Ho, and ¹⁵³Sm, to polypeptides. In a preferred embodiment, the radiometal ion associated with the macrocyclic chelators is ¹¹¹In. In another preferred embodiment, the radiometal ion associated with the macrocyclic chelator is ⁹⁰Y. In specific embodiments, the macrocyclic chelator is 1,4,7,10-tetraazacyclododecane-N,N′,N″,N′″-tetraacetic acid (DOTA). In other specific embodiments, DOTA is attached to an antibody of the invention or fragment thereof via a linker molecule. Examples of linker molecules useful for conjugating DOTA to a polypeptide are commonly known in the art—see, for example, DeNardo et al., Clin Cancer Res. 4(10):2483-90 (1998); Peterson et al., Bioconjug. Chem. 10(4):553-7 (1999); and Zimmerman et al, Nucl. Med. Biol. 26(8):943-50 (1999); which are hereby incorporated by reference in their entirety. 11951 As mentioned, the proteins of the invention may be modified by either natural processes, such as posttranslational processing, or by chemical modification techniques which are well known in the art. It will be appreciated that the same type of modification may be present in the same or varying degrees at several sites in a given polypeptide. Polypeptides of the invention may be branched, for example, as a result of ubiquitination, and they may be cyclic, with or without branching. Cyclic, branched, and branched cyclic polypeptides may result from posttranslation natural processes or may be made by synthetic methods. Modifications include acetylation, acylation, ADP-ribosylation, amidation, covalent attachment of flavin, covalent attachment of a heme moiety, covalent attachment of a nucleotide or nucleotide derivative, covalent attachment of a lipid or lipid derivative, covalent attachment of phosphotidylinositol, cross-linking, cyclization, disulfide bond formation, demethylation, formation of covalent cross-links, formation of cysteine, formation of pyroglutamate, formylation, gamma-carboxylation, glycosylation, GPI anchor formation, hydroxylation, iodination, methylation, myristoylation, oxidation, pegylation, proteolytic processing, phosphorylation, prenylation, racemization, selenoylation, sulfation, transfer-RNA mediated addition of amino acids to proteins such as arginylation, and ubiquitination. (See, for instance, PROTEINS—STRUCTURE AND MOLECULAR PROPERTIES, 2nd Ed., T. E. Creighton, W. H. Freeman and Company, New York (1993); POSTTPANSLATIONAL COVALENT MODIFICATION OF PROTEINS, B. C. Johnson, Ed., Academic Press, New York, pgs. 1-12 (1983); Seifter et al., Meth. Enzymol. 182:626-646 (1990); Rattan et al., Ann. N.Y. Acad. Sci. 663:48-62 (1992)).

[0207] Also provided by the invention are chemically modified derivatives of the polypeptides of the invention which may provide additional advantages such as increased solubility, stability and circulating time of the polypeptide, or decreased immunogenicity (see U.S. Pat. No. 4,179,337). The chemical moieties for derivitization may be selected from water soluble polymers such as polyethylene glycol, ethylene glycol/propylene glycol copolymers, carboxymethylcellulose, dextran, polyvinyl alcohol and the like. The polypeptides may be modified at random positions within the molecule, or at predetermined positions within the molecule and may include one, two, three or more attached chemical moieties.

[0208] The polymer may be of any molecular weight, and may be branched or unbranched. For polyethylene glycol, the preferred molecular weight is between about 1 kDa and about 100 kDa (the term “about” indicating that in preparations of polyethylene glycol, some molecules will weigh more, some less, than the stated molecular weight) for ease in handling and manufacturing. Other sizes may be used, depending on the desired therapeutic profile (e.g., the duration of sustained release desired, the effects, if any on biological activity, the ease in handling, the degree or lack of antigenicity and other known effects of the polyethylene glycol to a therapeutic protein or analog). For example, the polyethylene glycol may have an average molecular weight of about 200, 500, 1000, 1500, 2000, 2500, 3000, 3500, 4000, 4500, 5000, 5500, 6000, 6500, 7000, 7500, 8000, 8500, 9000, 9500, 10,000, 10,500, 11,000, 11,500, 12,000, 12,500, 13,000, 13,500, 14,000, 14,500, 15,000, 15,500, 16,000, 16,500, 17,000, 17,500, 18,000, 18,500, 19,000, 19,500, 20,000, 25,000, 30,000, 35,000, 40,000, 45,000, 50,000, 55,000, 60,000, 65,000, 70,000, 75,000, 80,000, 85,000, 90,000, 95,000, or 100,000 kDa.

[0209] As noted above, the polyethylene glycol may have a branched structure. Branched polyethylene glycols are described, for example, in U.S. Pat. No. 5,643,575; Morpurgo et al., Appl. Biochem. Biotechnol. 56:59-72 (1996); Vorobjev et al., Nucleosides Nucleotides 18:2745-2750 (1999); and Caliceti et al., Bioconjug. Chem. 10:638-646 (1999), the disclosures of each of which are incorporated herein by reference.

[0210] The polyethylene glycol molecules (or other chemical moieties) should be attached to the protein with consideration of effects on functional or antigenic domains of the protein. There are a number of attachment methods available to those skilled in the art, such as, for example, the method disclosed in EP 0 401 384 (coupling PEG to G-CSF), herein incorporated by reference; see also Malik et al., Exp. Hematol. 20:1028-1035 (1992), reporting pegylation of GM-CSF using tresyl chloride. For example, polyethylene glycol may be covalently bound through amino acid residues via a reactive group, such as a free amino or carboxyl group. Reactive groups are those to which an activated polyethylene glycol molecule may be bound. The amino acid residues having a free amino group may include lysine residues and the N-terminal amino acid residues; those having a free carboxyl group may include aspartic acid residues glutamic acid residues and the C-terminal amino acid residue. Sulfhydryl groups may also be used as a reactive group for attaching the polyethylene glycol molecules. Preferred for therapeutic purposes is attachment at an amino group, such as attachment at the N-terminus or lysine group.

[0211] As suggested above, polyethylene glycol may be attached to proteins via linkage to any of a number of amino acid residues. For example, polyethylene glycol can be linked to proteins via covalent bonds to lysine, histidine, aspartic acid, glutamic acid, or cysteine residues. One or more reaction chemistries may be employed to attach polyethylene glycol to specific amino acid residues (e.g., lysine, histidine, aspartic acid, glutamic acid, or cysteine) of the protein or to more than one type of amino acid residue (e.g., lysine, histidine, aspartic acid, glutamic acid, cysteine and combinations thereof) of the protein.

[0212] One may specifically desire proteins chemically modified at the N-terminus. Using polyethylene glycol as an illustration of the present composition, one may select from a variety of polyethylene glycol molecules (by molecular weight, branching, etc.), the proportion of polyethylene glycol molecules to protein (polypeptide) molecules in the reaction mix, the type of pegylation reaction to be performed, and the method of obtaining the selected N-terminally pegylated protein. The method of obtaining the N-terminally pegylated preparation (i.e., separating this moiety from other monopegylated moieties if necessary) may be by purification of the N-terminally pegylated material from a population of pegylated protein molecules. Selective proteins chemically modified at the N-terminus modification may be accomplished by reductive alkylation which exploits differential reactivity of different types of primary amino groups (lysine versus the N-terminal) available for derivatization in a particular protein. Under the appropriate reaction conditions, substantially selective derivatization of the protein at the N-terminus with a carbonyl group containing polymer is achieved.

[0213] As indicated above, pegylation of the proteins of the invention may be accomplished by any number of means. For example, polyethylene glycol may be attached to the protein either directly or by an intervening linker. Linkerless systems for attaching polyethylene glycol to proteins are described in Delgado et al., Crit. Rev. Thera. Drug Carrier Sys. 9:249-304 (1992); Francis et al., Intern. J. of Hematol. 68:1-18 (1998); U.S. Pat. No. 4,002,531; U.S. Pat. No. 5,349,052; WO 95/06058; and WO 98/32466, the disclosures of each of which are incorporated herein by reference.

[0214] One system for attaching polyethylene glycol directly to amino acid residues of proteins without an intervening linker employs tresylated MPEG, which is produced by the modification of monmethoxy polyethylene glycol (MPEG) using tresylchloride (ClS₂CH₂CF₃). Upon reaction of protein with tresylated MPEG, polyethylene glycol is directly attached to amine groups of the protein. Thus, the invention includes protein-polyethylene glycol conjugates produced by reacting proteins of the invention with a polyethylene glycol molecule having a 2,2,2-trifluoreothane sulphonyl group.

[0215] Polyethylene glycol can also be attached to proteins using a number of different intervening linkers. For example, U.S. Pat. No. 5,612,460, the entire disclosure of which is incorporated herein by reference, discloses urethane linkers for connecting polyethylene glycol to proteins. Protein-polyethylene glycol conjugates wherein the polyethylene glycol is attached to the protein by a linker can also be produced by reaction of proteins with compounds such as MPEG-succinimidylsuccinate, MPEG activated with 1,1′-carbonyldiimidazole, MPEG-2,4,5-trichloropenylcarbonate, MPEG-p-nitrophenolcarbonate, and various MPEG-succinate derivatives. A number of additional polyethylene glycol derivatives and reaction chemistries for attaching polyethylene glycol to proteins are described in International Publication No. WO 98/32466, the entire disclosure of which is incorporated herein by reference. Pegylated protein products produced using the reaction chemistries set out herein are included within the scope of the invention.

[0216] The number of polyethylene glycol moieties attached to each protein of the invention (i.e., the degree of substitution) may also vary. For example, the pegylated proteins of the invention may be linked, on average, to 1, 2, 3, 4, 5, 6, 7, 8, 9, 10, 12, 15, 17, 20, or more polyethylene glycol molecules. Similarly, the average degree of substitution within ranges such as 1-3, 2-4, 3-5, 4-6, 5-7, 6-8, 7-9, 8-10, 9-11, 10-12, 11-13, 12-14, 13-15, 14-16, 15-17, 16-18, 17-19, or 18-20 polyethylene glycol moieties per protein molecule. Methods for determining the degree of substitution are discussed, for example, in Delgado et al., Crit. Rev. Thera. Drug Carrier Sys. 9:249-304 (1992).

[0217] The polypeptides of the invention can be recovered and purified from chemical synthesis and recombinant cell cultures by standard methods which include, but are not limited to, ammonium sulfate or ethanol precipitation, acid extraction, anion or cation exchange chromatography, phosphocellulose chromatography, hydrophobic interaction chromatography, affinity chromatography, hydroxylapatite chromatography and lectin chromatography. Most preferably, high performance liquid chromatography (“HPLC”) is employed for purification. Well known techniques for refolding protein may be employed to regenerate active conformation when the polypeptide is denatured during isolation and/or purification.

[0218] The polypeptides of the invention may be in monomers or multimers (i.e., dimers, trimers, tetramers and higher multimers). Accordingly, the present invention relates to monomers and multimers of the polypeptides of the invention, their preparation, and compositions (preferably, Therapeutics) containing them. In specific embodiments, the polypeptides of the invention are monomers, dimers, trimers or tetramers. In additional embodiments, the multimers of the invention are at least dimers, at least trimers, or at least tetramers.

[0219] Multimers encompassed by the invention may be homomers or heteromers. As used herein, the term homomer refers to a multimer containing only polypeptides corresponding to a protein of the invention (e.g., the amino acid sequence of SEQ ID NO:Y, an amino acid sequence encoded by SEQ ID NO:X or the complement of SEQ ID NO:X, the amino acid sequence encoded by the portion of SEQ ID NO:X as defined in columns 8 and 9 of Table 2, and/or an amino acid sequence encoded by cDNA contained in Clone ID NO:Z (including fragments, variants, splice variants, and fusion proteins, corresponding to these as described herein)). These homomers may contain polypeptides having identical or different amino acid sequences. In a specific embodiment, a homomer of the invention is a multimer containing only polypeptides having an identical amino acid sequence. In another specific embodiment, a homomer of the invention is a multimer containing polypeptides having different amino acid sequences. In specific embodiments, the multimer of the invention is a homodimer (e.g., containing two polypeptides having identical or different amino acid sequences) or a homotrimer (e.g., containing three polypeptides having identical and/or different amino acid sequences). In additional embodiments, the homomeric multimer of the invention is at least a homodimer, at least a homotrimer, or at least a homotetramer.

[0220] As used herein, the term heteromer refers to a multimer containing one or more heterologous polypeptides (i.e., polypeptides of different proteins) in addition to the polypeptides of the invention. In a specific embodiment, the multimer of the invention is a heterodimer, a heterotrimer, or a heterotetramer. In additional embodiments, the heteromeric multimer of the invention is at least a heterodimer, at least a heterotrimer, or at least a heterotetramer.

[0221] Multimers of the invention may be the result of hydrophobic, hydrophilic, ionic and/or covalent associations and/or may be indirectly linked by, for example, liposome formation. Thus, in one embodiment, multimers of the invention, such as, for example, homodimers or homotrimers, are formed when polypeptides of the invention contact one another in solution. In another embodiment, heteromultimers of the invention, such as, for example, heterotrimers or heterotetramers, are formed when polypeptides of the invention contact antibodies to the polypeptides of the invention (including antibodies to the heterologous polypeptide sequence in a fusion protein of the invention) in solution. In other embodiments, multimers of the invention are formed by covalent associations with and/or between the polypeptides of the invention. Such covalent associations may involve one or more amino acid residues contained in the polypeptide sequence (e.g., that recited in SEQ ID NO:Y, encoded by the portion of SEQ ID NO:X as defined in columns 8 and 9 of Table 2, and/or encoded by the cDNA contained in Clone ID NO:Z). In one instance, the covalent associations are cross-linking between cysteine residues located within the polypeptide sequences which interact in the native (i.e., naturally occurring) polypeptide. In another instance, the covalent associations are the consequence of chemical or recombinant manipulation. Alternatively, such covalent associations may involve one or more amino acid residues contained in the heterologous polypeptide sequence in a fusion protein. In one example, covalent associations are between the heterologous sequence contained in a fusion protein of the invention (see, e.g., U.S. Pat. No. 5,478,925). In a specific example, the covalent associations are between the heterologous sequence contained in a Fc fusion protein of the invention (as described herein). In another specific example, covalent associations of fusion proteins of the invention are between heterologous polypeptide sequence from another protein that is capable of forming covalently associated multimers, such as for example, osteoprotegerin (see, e.g., International Publication NO: WO 98/49305, the contents of which are herein incorporated by reference in its entirety). In another embodiment, two or more polypeptides of the invention are joined through peptide linkers. Examples include those peptide linkers described in U.S. Pat. No. 5,073,627 (hereby incorporated by reference). Proteins comprising multiple polypeptides of the invention separated by peptide linkers may be produced using conventional recombinant DNA technology.

[0222] Another method for preparing multimer polypeptides of the invention involves use of polypeptides of the invention fused to a leucine zipper or isoleucine zipper polypeptide sequence. Leucine zipper and isoleucine zipper domains are polypeptides that promote multimerization of the proteins in which they are found. Leucine zippers were originally identified in several DNA-binding proteins (Landschulz et al., Science 240:1759, (1988)), and have since been found in a variety of different proteins. Among the known leucine zippers are naturally occurring peptides and derivatives thereof that dimerize or trimerize. Examples of leucine zipper domains suitable for producing soluble multimeric proteins of the invention are those described in PCT application WO 94/10308, hereby incorporated by reference. Recombinant fusion proteins comprising a polypeptide of the invention fused to a polypeptide sequence that dimerizes or trimerizes in solution are expressed in suitable host cells, and the resulting soluble multimeric fusion protein is recovered from the culture supernatant using techniques known in the art.

[0223] Trimeric polypeptides of the invention may offer the advantage of enhanced biological activity. Preferred leucine zipper moieties and isoleucine moieties are those that preferentially form trimers. One example is a leucine zipper derived from lung surfactant protein D (SPD), as described in Hoppe et al. (FEBS Letters 344:191, (1994)) and in U.S. patent application Ser. No. 08/446,922, hereby incorporated by reference. Other peptides derived from naturally occurring trimeric proteins may be employed in preparing trimeric polypeptides of the invention.

[0224] In another example, proteins of the invention are associated by interactions between Flag® polypeptide sequence contained in fusion proteins of the invention containing Flag® polypeptide sequence. In a further embodiment, proteins of the invention are associated by interactions between heterologous polypeptide sequence contained in Flag® fusion proteins of the invention and anti-Flag(® antibody.

[0225] The multimers of the invention may be generated using chemical techniques known in the art. For example, polypeptides desired to be contained in the multimers of the invention may be chemically cross-linked using linker molecules and linker molecule length optimization techniques known in the art (see, e.g., U.S. Pat. No. 5,478,925, which is herein incorporated by reference in its entirety). Additionally, multimers of the invention may be generated using techniques known in the art to form one or more inter-molecule cross-links between the cysteine residues located within the sequence of the polypeptides desired to be contained in the multimer (see, e.g., U.S. Pat. No. 5,478,925, which is herein incorporated by reference in its entirety). Further, polypeptides of the invention may be routinely modified by the addition of cysteine or biotin to the C-terminus or N-terminus of the polypeptide and techniques known in the art may be applied to generate multimers containing one or more of these modified polypeptides (see, e.g., U.S. Pat. No. 5,478,925, which is herein incorporated by reference in its entirety). Additionally, techniques known in the art may be applied to generate liposomes containing the polypeptide components desired to be contained in the multimer of the invention (see, e.g., U.S. Pat. No. 5,478,925, which is herein incorporated by reference in its entirety).

[0226] Alternatively, multimers of the invention may be generated using genetic engineering techniques known in the art. In one embodiment, polypeptides contained in multimers of the invention are produced recombinantly using fusion protein technology described herein or otherwise known in the art (see, e.g., U.S. Pat. No. 5,478,925, which is herein incorporated by reference in its entirety). In a specific embodiment, polynucleotides coding for a homodimer of the invention are generated by ligating a polynucleotide sequence encoding a polypeptide of the invention to a sequence encoding a linker polypeptide and then further to a synthetic polynucleotide encoding the translated product of the polypeptide in the reverse orientation from the original C-terminus to the N-terminus (lacking the leader sequence) (see, e.g., U.S. Pat. No. 5,478,925, which is herein incorporated by reference in its entirety). In another embodiment, recombinant techniques described herein or otherwise known in the art are applied to generate recombinant polypeptides of the invention which contain a transmembrane domain (or hydrophobic or signal peptide) and which can be incorporated by membrane reconstitution techniques into liposomes (see, e.g., U.S. Pat. No. 5,478,925, which is herein incorporated by reference in its entirety).

[0227] Antibodies

[0228] Further polypeptides of the invention relate to antibodies and T-cell antigen receptors (TCR) which immunospecifically bind a polypeptide, polypeptide fragment, or variant of the invention (e.g., a polypeptide or fragment or variant of the amino acid sequence of SEQ ID NO:Y or a polypeptide encoded by the cDNA contained in Clone ID No:Z, and/or an epitope, of the present invention) as determined by immunoassays well known in the art for assaying specific antibody-antigen binding. Antibodies of the invention include, but are not limited to, polyclonal, monoclonal, multispecific, human, humanized or chimeric antibodies, single chain antibodies, Fab fragments, F(ab′) fragments, fragments produced by a Fab expression library, anti-idiotypic (anti-Id) antibodies (including, e.g., anti-Id antibodies to antibodies of the invention), intracellularly-made antibodies (i.e., intrabodies), and epitope-binding fragments of any of the above. The term “antibody,” as used herein, refers to immunoglobulin molecules and immunologically active portions of immunoglobulin molecules, i.e., molecules that contain an antigen binding site that immunospecifically binds an antigen. The immunoglobulin molecules of the invention can be of any type (e.g., IgG, IgE, IgM, IgD, IgA and IgY), class (e.g., IgG1, IgG2, IgG3, IgG4, IgA1 and IgA2) or subclass of immunoglobulin molecule. In preferred embodiments, the immunoglobulin molecules of the invention are IgGI. In other preferred embodiments, the immunoglobulin molecules of the invention are IgG4.

[0229] Most preferably the antibodies are human antigen-binding antibody fragments of the present invention and include, but are not limited to, Fab, Fab′ and F(ab′)2, Fd, single-chain Fvs (scFv), single-chain antibodies, disulfide-linked Fvs (sdFv) and fragments comprising either a VL or VH domain. Antigen-binding antibody fragments, including single-chain antibodies, may comprise the variable region(s) alone or in combination with the entirety or a portion of the following: hinge region, CH1, CH2, and CH3 domains. Also included in the invention are antigen-binding fragments also comprising any combination of variable region(s) with a hinge region, CH1, CH2, and CH3 domains. The antibodies of the invention may be from any animal origin including birds and mammals. Preferably, the antibodies are human, murine (e.g., mouse and rat), donkey, ship rabbit, goat, guinea pig, camel, horse, or chicken. As used herein, “human” antibodies include antibodies having the amino acid sequence of a human immunoglobulin and include antibodies isolated from human immunoglobulin libraries or from animals transgenic for one or more human immunoglobulin and that do not express endogenous immunoglobulins, as described infra and, for example in, U.S. Pat. No. 5,939,598 by Kucherlapati et al.

[0230] The antibodies of the present invention may be monospecific, bispecific, trispecific or of greater multispecificity. Multispecific antibodies may be specific for different epitopes of a polypeptide of the present invention or may be specific for both a polypeptide of the present invention as well as for a heterologous epitope, such as a heterologous polypeptide or solid support material. See, e.g., PCT publications WO 93/17715; WO 92/08802; WO 91/00360; WO 92/05793; Tutt, et al., J. Immunol. 147:60-69 (1991); U.S. Pat. Nos. 4,474,893; 4,714,681; 4,925,648; 5,573,920; 5,601,819; Kostelny et al., J. Immunol. 148:1547-1553 (1992).

[0231] Antibodies of the present invention may be described or specified in terms of the epitope(s) or portion(s) of a polypeptide of the present invention which they recognize or specifically bind. The epitope(s) or polypeptide portion(s) may be specified as described herein, e.g., by N-terminal and C-terminal positions, or by size in contiguous amino acid residues, or listed in the Tables and Figures. Preferred epitopes of the invention include the predicted epitopes shown in column 7 of Table 1A, as well as polynucleotides that encode these epitopes. Antibodies which specifically bind any epitope or polypeptide of the present invention may also be excluded. Therefore, the present invention includes antibodies that specifically bind polypeptides of the present invention, and allows for the exclusion of the same.

[0232] Antibodies of the present invention may also be described or specified in terms of their cross-reactivity. Antibodies that do not bind any other analog, ortholog, or homolog of a polypeptide of the present invention are included. Antibodies that bind polypeptides with at least 95%, at least 90%, at least 85%, at least 80%, at least 75%, at least 70%, at least 65%, at least 60%, at least 55%, and at least 50% identity (as calculated using methods known in the art and described herein) to a polypeptide of the present invention are also included in the present invention. In specific embodiments, antibodies of the present invention cross-react with murine, rat and/or rabbit homologs of human proteins and the corresponding epitopes thereof. Antibodies that do not bind polypeptides with less than 95%, less than 90%, less than 85%, less than 80%, less than 75%, less than 70%, less than 65%, less than 60%, less than 55%, and less than 50% identity (as calculated using methods known in the art and described herein) to a polypeptide of the present invention are also included in the present invention. In a specific embodiment, the above-described cross-reactivity is with respect to any single specific antigenic or immunogenic polypeptide, or combination(s) of 2, 3, 4, 5, or more of the specific antigenic and/or immunogenic polypeptides disclosed herein. Further included in the present invention are antibodies which bind polypeptides encoded by polynucleotides which hybridize to a polynucleotide of the present invention under stringent hybridization conditions (as described herein). Antibodies of the present invention may also be described or specified in terms of their binding affinity to a polypeptide of the invention. Preferred binding affinities include those with a dissociation constant or Kd less than 5×10⁻² M, 10⁻² M, 5×10⁻³ M, 10⁻³ M, 5×10⁻⁴ M, 10⁻⁴ M, 5×10⁻⁵ M, 10⁻⁵ M, 5×10⁻⁶ M, 10⁻⁶ M, 5×10⁻⁷ M, 10⁷ M, 5×10⁻⁸ M, 10⁻⁸ M, 5×10⁻⁹ M, 10⁻⁹ M, 5×10⁻¹⁰ M, 10⁻¹⁰ M, 5×10⁻¹¹ M, 10⁻¹¹ M, 5×10⁻¹² M, 10⁻¹² M, 5×10⁻¹³ M, 10⁻¹³ M, 5×10⁻¹⁴ M, 10⁻¹⁴ M, 5×10⁻¹⁵ M, or 10⁻¹⁵ M.

[0233] The invention also provides antibodies that competitively inhibit binding of an antibody to an epitope of the invention as determined by any method known in the art for determining competitive binding, for example, the immunoassays described herein. In preferred embodiments, the antibody competitively inhibits binding to the epitope by at least 95%, at least 90%, at least 85%, at least 80%, at least 75%, at least 70%, at least 60%, or at least 50%.

[0234] Antibodies of the present invention may act as agonists or antagonists of the polypeptides of the present invention. For example, the present invention includes antibodies which disrupt the receptor/ligand interactions with the polypeptides of the invention either partially or fully. Preferably, antibodies of the present invention bind an antigenic epitope disclosed herein, or a portion thereof. The invention features both receptor-specific antibodies and ligand-specific antibodies. The invention also features receptor-specific antibodies which do not prevent ligand binding but prevent receptor activation. Receptor activation (i.e., signaling) may be determined by techniques described herein or otherwise known in the art. For example, receptor activation can be determined by detecting the phosphorylation (e.g., tyrosine or serine/threonine) of the receptor or its substrate by immunoprecipitation followed by western blot analysis (for example, as described supra). In specific embodiments, antibodies are provided that inhibit ligand activity or receptor activity by at least 95%, at least 90%, at least 85%, at least 80%, at least 75%, at least 70%, at least 60%, or at least 50% of the activity in absence of the antibody.

[0235] The invention also features receptor-specific antibodies which both prevent ligand binding and receptor activation as well as antibodies that recognize the receptor-ligand complex, and, preferably, do not specifically recognize the unbound receptor or the unbound ligand. Likewise, included in the invention are neutralizing antibodies which bind the ligand and prevent binding of the ligand to the receptor, as well as antibodies which bind the ligand, thereby preventing receptor activation, but do not prevent the ligand from binding the receptor. Further included in the invention are antibodies which activate the receptor. These antibodies may act as receptor agonists, i.e., potentiate or activate either all or a subset of the biological activities of the ligand-mediated receptor activation, for example, by inducing dimerization of the receptor. The antibodies may be specified as agonists, antagonists or inverse agonists for biological activities comprising the specific biological activities of the peptides of the invention disclosed herein. The above antibody agonists can be made using methods known in the art. See, e.g., PCT publication WO 96/40281; U.S. Pat. No. 5,811,097; Deng et al., Blood 92(6):1981-1988 (1998); Chen et al., Cancer Res. 58(16):3668-3678 (1998); Harrop et al., J. Immunol. 161(4):1786-1794 (1998); Zhu et al., Cancer Res. 58(15):3209-3214 (1998); Yoon et al., J. Immunol. 160(7):3170-3179 (1998); Prat et al., J. Cell. Sci. 111(Pt2):237-247 (1998); Pitard et al., J. Immunol. Methods 205(2):177-190 (1997); Liautard et al., Cytokine 9(4):233-241 (1997); Carlson et al., J. Biol. Chem. 272(17):11295-11301 (1997); Taryman et al., Neuron 14(4):755-762 (1995); Muller et al., Structure 6(9):1153-1167 (1998); Bartunek et al., Cytokine 8(1):14-20 (1996) (which are all incorporated by reference herein in their entireties).

[0236] Antibodies of the present invention may be used, for example, to purify, detect, and target the polypeptides of the present invention, including both in vitro and in vivo diagnostic and therapeutic methods. For example, the antibodies have utility in immunoassays for qualitatively and quantitatively measuring levels of the polypeptides of the present invention in biological samples. See, e.g., Harlow et al., Antibodies: A Laboratory Manual, (Cold Spring Harbor Laboratory Press, 2nd ed. 1988); incorporated by reference herein in its entirety.

[0237] As discussed in more detail below, the antibodies of the present invention may be used either alone or in combination with other compositions. The antibodies may further be recombinantly fused to a heterologous polypeptide at the N- or C-terminus or chemically conjugated (including covalent and non-covalent conjugations) to polypeptides or other compositions. For example, antibodies of the present invention may be recombinantly fused or conjugated to molecules useful as labels in detection assays and effector molecules such as heterologous polypeptides, drugs, radionuclides, or toxins. See, e.g., PCT publications WO 92/08495; WO 91/14438; WO 89/12624; U.S. Pat. No. 5,314,995; and EP 396,387; the disclosures of which are incorporated herein by reference in their entireties.

[0238] The antibodies of the invention include derivatives that are modified, i.e, by the covalent attachment of any type of molecule to the antibody such that covalent attachment does not prevent the antibody from generating an anti-idiotypic response. For example, but not by way of limitation, the antibody derivatives include antibodies that have been modified, e.g., by glycosylation, acetylation, pegylation, phosphylation, amidation, derivatization by known protecting/blocking groups, proteolytic cleavage, linkage to a cellular ligand or other protein, etc. Any of numerous chemical modifications may be carried out by known techniques, including, but not limited to specific chemical cleavage, acetylation, formylation, metabolic synthesis of tunicamycin, etc. Additionally, the derivative may contain one or more non-classical amino acids.

[0239] The antibodies of the present invention may be generated by any suitable method known in the art. Polyclonal antibodies to an antigen-of- interest can be produced by various procedures well known in the art. For example, a polypeptide of the invention can be administered to various host animals including, but not limited to, rabbits, mice, rats, etc. to induce the production of sera containing polyclonal antibodies specific for the antigen. Various adjuvants may be used to increase the immunological response, depending on the host species, and include but are not limited to, Freund's (complete and incomplete), mineral gels such as aluminum hydroxide, surface active substances such as lysolecithin, pluronic polyols, polyanions, peptides, oil emulsions, keyhole limpet hemocyanins, dinitrophenol, and potentially useful human adjuvants such as BCG (bacille Calmette-Guerin) and corynebacterium parvum. Such adjuvants are also well known in the art.

[0240] Monoclonal antibodies can be prepared using a wide variety of techniques known in the art including the use of hybridoma, recombinant, and phage display technologies, or a combination thereof. For example, monoclonal antibodies can be produced using hybridoma techniques including those known in the art and taught, for example, in Harlow et al., Antibodies: A Laboratory Manual, (Cold Spring Harbor Laboratory Press, 2nd ed. 1988); Hammerling, et al., in: Monoclonal Antibodies and T-Cell Hybridomas 563-681 (Elsevier, N.Y., 1981) (said references incorporated by reference in their entireties). The term “monoclonal antibody” as used herein is not limited to antibodies produced through hybridoma technology. The term “monoclonal antibody” refers to an antibody that is derived from a single clone, including any eukaryotic, prokaryotic, or phage clone, and not the method by which it is produced.

[0241] Methods for producing and screening for specific antibodies using hybridoma technology are routine and well known in the art and are discussed in detail in the Examples. In a non-limiting example, mice can be immunized with a polypeptide of the invention or a cell expressing such peptide. Once an immune response is detected, e.g., antibodies specific for the antigen are detected in the mouse serum, the mouse spleen is harvested and splenocytes isolated. The splenocytes are then fused by well known techniques to any suitable myeloma cells, for example cells from cell line SP20 available from the ATCC. Hybridomas are selected and cloned by limited dilution. The hybridoma clones are then assayed by methods known in the art for cells that secrete antibodies capable of binding a polypeptide of the invention. Ascites fluid, which generally contains high levels of antibodies, can be generated by immunizing mice with positive hybridoma clones.

[0242] Accordingly, the present invention provides methods of generating monoclonal antibodies as well as antibodies produced by the method comprising culturing a hybridoma cell secreting an antibody of the invention wherein, preferably, the hybridoma is generated by fusing splenocytes isolated from a mouse immunized with an antigen of the invention with myeloma cells and then screening the hybridomas resulting from the fusion for hybridoma clones that secrete an antibody able to bind a polypeptide of the invention.

[0243] Another well known method for producing both polyclonal and monoclonal human B cell lines is transformation using Epstein Barr Virus (EBV). Protocols for generating EBV-transformed B cell lines are commonly known in the art, such as, for example, the protocol outlined in Chapter 7.22 of Current Protocols in Immunology, Coligan et al., Eds., 1994, John Wiley & Sons, NY, which is hereby incorporated in its entirety by reference. The source of B cells for transformation is commonly human peripheral blood, but B cells for transformation may also be derived from other sources including, but not limited to, lymph nodes, tonsil, spleen, tumor tissue, and infected tissues. Tissues are generally made into single cell suspensions prior to EBV transformation. Additionally, steps may be taken to either physically remove or inactivate T cells (e.g., by treatment with cyclosporin A) in B cell-containing samples, because T cells from individuals seropositive for anti-EBV antibodies can suppress B cell immortalization by EBV.

[0244] In general, the sample containing human B cells is innoculated with EBV, and cultured for 3-4 weeks. A typical source of EBV is the culture supernatant of the B95-8 cell line (ATCC #VR-1492). Physical signs of EBV transformation can generally be seen towards the end of the 3-4 week culture period. By phase-contrast microscopy, transformed cells may appear large, clear, hairy and tend to aggregate in tight clusters of cells. Initially, EBV lines are generally polyclonal. However, over prolonged periods of cell cultures, EBV lines may become monoclonal or polyclonal as a result of the selective outgrowth of particular B cell clones. Alternatively, polyclonal EBV transformed lines may be subcloned (e.g., by limiting dilution culture) or fused with a suitable fusion partner and plated at limiting dilution to obtain monoclonal B cell lines. Suitable fusion partners for EBV transformed cell lines include mouse myeloma cell lines (e.g., SP2/0, X63-Ag8.653), heteromyeloma cell lines (human×mouse; e.g, SPAM-8, SBC-H20, and CB-F7), and human cell lines (e.g., GM 1500, SKO-007, RPMI 8226, and KR-4). Thus, the present invention also provides a method of generating polyclonal or monoclonal human antibodies against polypeptides of the invention or fragments thereof, comprising EBV-transformation of human B cells.

[0245] Antibody fragments which recognize specific epitopes may be generated by known techniques. For example, Fab and F(ab′)2 fragments of the invention may be produced by proteolytic cleavage of immunoglobulin molecules, using enzymes such as papain (to produce Fab fragments) or pepsin (to produce F(ab′)2 fragments). F(ab′)2 fragments contain the variable region, the light chain constant region and the CHi domain of the heavy chain.

[0246] For example, the antibodies of the present invention can also be generated using various phage display methods known in the art. In phage display methods, functional antibody domains are displayed on the surface of phage particles which carry the polynucleotide sequences encoding them. In a particular embodiment, such phage can be utilized to display antigen binding domains expressed from a repertoire or combinatorial antibody library (e.g., human or murine). Phage expressing an antigen binding domain that binds the antigen of interest can be selected or identified with antigen, e.g., using labeled antigen or antigen bound or captured to a solid surface or bead. Phage used in these methods are typically filamentous phage including fd and M13 binding domains expressed from phage with Fab, Fv or disulfide stabilized Fv antibody domains recombinantly fused to either the phage gene III or gene VIII protein. Examples of phage display methods that can be used to make the antibodies of the present invention include those disclosed in Brinkman et al., J. Immunol. Methods 182:41-50 (1995); Ames et al., J. Immunol. Methods 184:177-186 (1995); Kettleborough et al., Eur. J. Immunol. 24:952-958 (1994); Persic et al., Gene 187 9-18 (1997); Burton et al., Advances in Immunology 57:191-280 (1994); PCT application No. PCT/GB91/01134; PCT publications WO 90/02809; WO 91/10737; WO 92/01047; WO 92/18619; WO 93/11236; WO 95/15982; WO 95/20401; and U.S. Pat. Nos. 5,698,426; 5,223,409; 5,403,484; 5,580,717; 5,427,908; 5,750,753; 5,821,047; 5,571,698; 5,427,908; 5,516,637; 5,780,225; 5,658,727; 5,733,743 and 5,969,108; each of which is incorporated herein by reference in its entirety.

[0247] As described in the above references, after phage selection, the antibody coding regions from the phage can be isolated and used to generate whole antibodies, including human antibodies, or any other desired antigen binding fragment, and expressed in any desired host, including mammalian cells, insect cells, plant cells, yeast, and bacteria, e.g., as described in detail below. For example, techniques to recombinantly produce Fab, Fab′ and F(ab′)2 fragments can also be employed using methods known in the art such as those disclosed in PCT publication WO 92/22324; Mullinax et al., BioTechniques 12(6):864-869 (1992); and Sawai et al., AJRI 34:26-34 (1995); and Better et al., Science 240:1041-1043 (1988) (said references incorporated by reference in their entireties).

[0248] Examples of techniques which can be used to produce single-chain Fvs and antibodies include those described in U.S. Pat. Nos. 4,946,778 and 5,258,498; Huston et al., Methods in Enzymology 203:46-88 (1991); Shu et al., PNAS 90:7995-7999 (1993); and Skerra et al., Science 240:1038-1040 (1988). For some uses, including in vivo use of antibodies in humans and in vitro detection assays, it may be preferable to use chimeric, humanized, or human antibodies. A chimeric antibody is a molecule in which different portions of the antibody are derived from different animal species, such as antibodies having a variable region derived from a murine monoclonal antibody and a human immunoglobulin constant region. Methods for producing chimeric antibodies are known in the art. See e.g., Morrison, Science 229:1202 (1985); Oi et al., BioTechniques 4:214 (1986); Gillies et al., (1989) J. Immunol. Methods 125:191-202; U.S. Pat. Nos. 5,807,715; 4,816,567; and 4,816397, which are incorporated herein by reference in their entirety. Humanized antibodies are antibody molecules from non-human species antibody that binds the desired antigen having one or more complementarity determining regions (CDRs) from the non-human species and a framework regions from a human immunoglobulin molecule. Often, framework residues in the human framework regions will be substituted with the corresponding residue from the CDR donor antibody to alter, preferably improve, antigen binding. These framework substitutions are identified by methods well known in the art, e.g., by modeling of the interactions of the CDR and framework residues to identify framework residues important for antigen binding and sequence comparison to identify unusual framework residues at particular positions. (See, e.g., Queen et al., U.S. Pat. No. 5,585,089; Riechmann et al., Nature 332:323 (1988), which are incorporated herein by reference in their entireties.) Antibodies can be humanized using a variety of techniques known in the art including, for example, CDR-grafting (EP 239,400; PCT publication WO 91/09967; U.S. Pat. Nos. 5,225,539; 5,530,101; and 5,585,089), veneering or resurfacing (EP 592,106; EP 519,596; Padlan, Molecular Immunology 28(4/5):489-498 (1991); Studnicka et al., Protein Engineering 7(6):805-814 (1994); Roguska. et al., PNAS 91:969-973 (1994)), and chain shuffling (U.S. Pat. No. 5,565,332).

[0249] Completely human antibodies are particularly desirable for therapeutic treatment of human patients. Human antibodies can be made by a variety of methods known in the art including phage display methods described above using antibody libraries derived from human immunoglobulin sequences. See also, U.S. Pat. Nos. 4,444,887 and 4,716,111; and PCT publications WO 98/46645, WO 98/50433, WO 98/24893, WO 98/16654, WO 96/34096, WO 96/33735, and WO 91/10741; each of which is incorporated herein by reference in its entirety.

[0250] Human antibodies can also be produced using transgenic mice which are incapable of expressing functional endogenous immunoglobulins, but which can express human immunoglobulin genes. For example, the human heavy and light chain immunoglobulin gene complexes may be introduced randomly or by homologous recombination into mouse embryonic stem cells. Alternatively, the human variable region, constant region, and diversity region may be introduced into mouse embryonic stem cells in addition to the human heavy and light chain genes. The mouse heavy and light chain immunoglobulin genes may be rendered non-functional separately or simultaneously with the introduction of human immunoglobulin loci by homologous recombination. In particular, homozygous deletion of the JH region prevents endogenous antibody production. The modified embryonic stem cells are expanded and microinjected into blastocysts to produce chimeric mice. The chimeric mice are then bred to produce homozygous offspring which express human antibodies. The transgenic mice are immunized in the normal fashion with a selected antigen, e.g., all or a portion of a polypeptide of the invention. Monoclonal antibodies directed against the antigen can be obtained from the immunized, transgenic mice using conventional hybridoma technology. The human immunoglobulin transgenes harbored by the transgenic mice rearrange during B cell differentiation, and subsequently undergo class switching and somatic mutation. Thus, using such a technique, it is possible to produce therapeutically useful IgG, IgA, IgM and IgE antibodies. For an overview of this technology for producing human antibodies, see Lonberg and Huszar, Int. Rev. Immunol. 13:65-93 (1995). For a detailed discussion of this technology for producing human antibodies and human monoclonal antibodies and protocols for producing such antibodies, see, e.g., PCT publications WO 98/24893; WO 92/01047; WO 96/34096; WO 96/33735; European Patent No. 0 598 877; U.S. Pat. Nos. 5,413,923; 5,625,126; 5,633,425; 5,569,825; 5,661,016; 5,545,806; 5,814,318; 5,885,793; 5,916,771; 5,939,598; 6,075,181; and 6,114,598, which are incorporated by reference herein in their entirety. In addition, companies such as Abgenix, Inc. (Freemont, Calif.) and Genpharm (San Jose, Calif.) can be engaged to provide human antibodies directed against a selected antigen using technology similar to that described above.

[0251] Completely human antibodies which recognize a selected epitope can be generated using a technique referred to as “guided selection.” In this approach a selected non-human monoclonal antibody, e.g., a mouse antibody, is used to guide the selection of a completely human antibody recognizing the same epitope. (Jespers et al., Bio/technology 12:899-903 (1988)).

[0252] Further, antibodies to the polypeptides of the invention can, in turn, be utilized to generate anti-idiotype antibodies that “mimic” polypeptides of the invention using techniques well known to those skilled in the art. (See, e.g., Greenspan & Bona, FASEB J. 7(5):437-444; (1989) and Nissinoff, J. Immunol. 147(8):2429-2438 (1991)). For example, antibodies which bind to and competitively inhibit polypeptide multimerization and/or binding of a polypeptide of the invention to a ligand can be used to generate anti-idiotypes that “mimic” the polypeptide multimerization and/or binding domain and, as a consequence, bind to and neutralize polypeptide and/or its ligand. Such neutralizing anti-idiotypes or Fab fragments of such anti-idiotypes can be used in therapeutic regimens to neutralize polypeptide ligand(s)/receptor(s). For example, such anti-idiotypic antibodies can be used to bind a polypeptide of the invention and/or to bind its ligand(s)/receptor(s), and thereby block its biological activity. Alternatively, antibodies which bind to and enhance polypeptide multimerization and/or binding, and/or receptor/ligand multimerization, binding and/or signaling can be used to generate anti-idiotypes that function as agonists of a polypeptide of the invention and/or its ligand/receptor. Such agonistic anti-idiotypes or Fab fragments of such anti-idiotypes can be used in therapeutic regimens as agonists of the polypeptides of the invention or its ligand(s)/receptor(s). For example, such anti-idiotypic antibodies can be used to bind a polypeptide of the invention and/or to bind its ligand(s)/receptor(s), and thereby promote or enhance its biological activity.

[0253] Intrabodies of the invention can be produced using methods known in the art, such as those disclosed and reviewed in Chen et al., Hum. Gene Ther. 5:595-601 (1994); Marasco, W.A., Gene Ther. 4:11-15 (1997); Rondon and Marasco, Annu. Rev. Microbiol. 51:257-283 (1997); Proba et al., J. Mol. Biol. 275:245-253 (1998); Cohen et al., Oncogene 17:2445-2456 (1998); Ohage and Steipe, J. Mol. Biol. 291:1119-1128 (1999); Ohage et al., J. Mol. Biol. 291:1129-1134 (1999); Wirtz and Steipe, Protein Sci. 8:2245-2250 (1999); Zhu et al., J. Immunol. Methods 231:207-222 (1999); and references cited therein.

[0254] Polynucleotides Encoding Antibodies

[0255] The invention further provides polynucleotides comprising a nucleotide sequence encoding an antibody of the invention and fragments thereof. The invention also encompasses polynucleotides that hybridize under stringent or alternatively, under lower stringency hybridization conditions, e.g., as defined supra, to polynucleotides that encode an antibody, preferably, that specifically binds to a polypeptide of the invention, preferably, an antibody that binds to a polypeptide having the amino acid sequence of SEQ ID NO:Y, to a polypeptide encoded by a portion of SEQ ID NO:X as defined in columns 8 and 9 of Table 2, and/or to a polypeptide encoded by the cDNA contained in Clone ID NO:Z.

[0256] The polynucleotides may be obtained, and the nucleotide sequence of the polynucleotides determined, by any method known in the art. For example, if the nucleotide sequence of the antibody is known, a polynucleotide encoding the antibody may be assembled from chemically synthesized oligonucleotides (e.g., as described in Kutmeier et al., BioTechniques 17:242 (1994)), which, briefly, involves the synthesis of overlapping oligonucleotides containing portions of the sequence encoding the antibody, annealing and ligating of those oligonucleotides, and then amplification of the ligated oligonucleotides by PCR.

[0257] Alternatively, a polynucleotide encoding an antibody may be generated from nucleic acid from a suitable source. If a clone containing a nucleic acid encoding a particular antibody is not available, but the sequence of the antibody molecule is known, a nucleic acid encoding the immunoglobulin may be chemically synthesized or obtained from a suitable source (e.g., an antibody cDNA library, or a cDNA library generated from, or nucleic acid, preferably poly A+RNA, isolated from, any tissue or cells expressing the antibody, such as hybridoma cells selected to express an antibody of the invention) by PCR amplification using synthetic primers hybridizable to the 3′ and 5′ ends of the sequence or by cloning using an oligonucleotide probe specific for the particular gene sequence to identify, e.g., a cDNA clone from a cDNA library that encodes the antibody. Amplified nucleic acids generated by PCR may then be cloned into replicable cloning vectors using any method well known in the art.

[0258] Once the nucleotide sequence and corresponding amino acid sequence of the antibody is determined, the nucleotide sequence of the antibody may be manipulated using methods well known in the art for the manipulation of nucleotide sequences, e.g., recombinant DNA techniques, site directed mutagenesis, PCR, etc. (see, for example, the techniques described in Sambrook et al., 1990, Molecular Cloning, A Laboratory Manual, 2d Ed., Cold Spring Harbor Laboratory, Cold Spring Harbor, N.Y. and Ausubel et al., eds., 1998, Current Protocols in Molecular Biology, John Wiley & Sons, NY, which are both incorporated by reference herein in their entireties ), to generate antibodies having a different amino acid sequence, for example to create amino acid substitutions, deletions, and/or insertions.

[0259] In a specific embodiment, the amino acid sequence of the heavy and/or light chain variable domains may be inspected to identify the sequences of the complementarity determining regions (CDRs) by methods that are well know in the art, e.g., by comparison to known amino acid sequences of other heavy and light chain variable regions to determine the regions of sequence hypervariability. Using routine recombinant DNA techniques, one or more of the CDRs may be inserted within framework regions, e.g., into human framework regions to humanize a non-human antibody, as described supra. The framework regions may be naturally occurring or consensus framework regions, and preferably human framework regions (see, e.g., Chothia et al., J. Mol. Biol. 278: 457-479 (1998) for a listing of human framework regions). Preferably, the polynucleotide generated by the combination of the framework regions and CDRs encodes an antibody that specifically binds a polypeptide of the invention. Preferably, as discussed supra, one or more amino acid substitutions may be made within the framework regions, and, preferably, the amino acid substitutions improve binding of the antibody to its antigen. Additionally, such methods may be used to make amino acid substitutions or deletions of one or more variable region cysteine residues participating in an intrachain disulfide bond to generate antibody molecules lacking one or more intrachain disulfide bonds. Other alterations to the polynucleotide are encompassed by the present invention and within the skill of the art.

[0260] In addition, techniques developed for the production of “chimeric antibodies” (Morrison et al., Proc. Natl. Acad. Sci. 81:851-855 (1984); Neuberger et al., Nature 312:604-608 (1984); Takeda et al., Nature 314:452-454 (1985)) by splicing genes from a mouse antibody molecule of appropriate antigen specificity together with genes from a human antibody molecule of appropriate biological activity can be used. As described supra, a chimeric antibody is a molecule in which different portions are derived from different animal species, such as those having a variable region derived from a murine mAb and a human immunoglobulin constant region, e.g., humanized antibodies.

[0261] Alternatively, techniques described for the production of single chain antibodies (U.S. Pat. No. 4,946,778; Bird, Science 242:423- 42 (1988); Huston et al., Proc. Natl. Acad. Sci. USA 85:5879-5883 (1988); and Ward et al., Nature 334:544-54 (1989)) can be adapted to produce single chain antibodies. Single chain antibodies are formed by linking the heavy and light chain fragments of the Fv region via an amino acid bridge, resulting in a single chain polypeptide. Techniques for the assembly of functional Fv fragments in E. coli may also be used (Skerra et al., Science 242:1038- 1041 (1988)).

[0262] Methods of Producing Antibodies

[0263] The antibodies of the invention can be produced by any method known in the art for the synthesis of antibodies, in particular, by chemical synthesis or preferably, by recombinant expression techniques. Methods of producing antibodies include, but are not limited to, hybridoma technology, EBV transformation, and other methods discussed herein as well as through the use recombinant DNA technology, as discussed below.

[0264] Recombinant expression of an antibody of the invention, or fragment, derivative or analog thereof, (e.g., a heavy or light chain of an antibody of the invention or a single chain antibody of the invention), requires construction of an expression vector containing a polynucleotide that encodes the antibody. Once a polynucleotide encoding an antibody molecule or a heavy or light chain of an antibody, or portion thereof (preferably containing the heavy or light chain variable domain), of the invention has been obtained, the vector for the production of the antibody molecule may be produced by recombinant DNA technology using techniques well known in the art. Thus, methods for preparing a protein by expressing a polynucleotide containing an antibody encoding nucleotide sequence are described herein. Methods which are well known to those skilled in the art can be used to construct expression vectors containing antibody coding sequences and appropriate transcriptional and translational control signals. These methods include, for example, in vitro recombinant DNA techniques, synthetic techniques, and in vivo genetic recombination. The invention, thus, provides replicable vectors comprising a nucleotide sequence encoding an antibody molecule of the invention, or a heavy or light chain thereof, or a heavy or light chain variable domain, operably linked to a promoter. Such vectors may include the nucleotide sequence encoding the constant region of the antibody molecule (see, e.g., PCT Publication WO 86/05807; PCT Publication WO 89/01036; and U.S. Pat. No. 5,122,464) and the variable domain of the antibody may be cloned into such a vector for expression of the entire heavy or light chain.

[0265] The expression vector is transferred to a host cell by conventional techniques and the transfected cells are then cultured by conventional techniques to produce an antibody of the invention. Thus, the invention includes host cells containing a polynucleotide encoding an antibody of the invention, or a heavy or light chain thereof, or a single chain antibody of the invention, operably linked to a heterologous promoter. In preferred embodiments for the expression of double-chained antibodies, vectors encoding both the heavy and light chains may be co-expressed in the host cell for expression of the entire immunoglobulin molecule, as detailed below.

[0266] A variety of host-expression vector systems may be utilized to express the antibody molecules of the invention. Such host-expression systems represent vehicles by which the coding sequences of interest may be produced and subsequently purified, but also represent cells which may, when transformed or transfected with the appropriate nucleotide coding sequences, express an antibody molecule of the invention in situ. These include but are not limited to microorganisms such as bacteria (e.g., E. coli, B. subtilis) transformed with recombinant bacteriophage DNA, plasmid DNA or cosmid DNA expression vectors containing antibody coding sequences; yeast (e.g., Saccharomyces, Pichia) transformed with recombinant yeast expression vectors containing antibody coding sequences; insect cell systems infected with recombinant virus expression vectors (e.g., baculovirus) containing antibody coding sequences; plant cell systems infected with recombinant virus expression vectors (e.g., cauliflower mosaic virus, CaMV; tobacco mosaic virus, TMV) or transformed with recombinant plasmid expression vectors (e.g., Ti plasmid) containing antibody coding sequences; or mammalian cell systems (e.g., COS, CHO, BHK, 293, 3T3 cells) harboring recombinant expression constructs containing promoters derived from the genome of mammalian cells (e.g., metallothionein promoter) or from mammalian viruses (e.g., the adenovirus late promoter; the vaccinia virus 7.5K promoter). Preferably, bacterial cells such as Escherichia coli, and more preferably, eukaryotic cells, especially for the expression of whole recombinant antibody molecule, are used for the expression of a recombinant antibody molecule. For example, mammalian cells such as Chinese hamster ovary cells (CHO), in conjunction with a vector such as the major intermediate early gene promoter element from human cytomegalovirus is an effective expression system for antibodies (Foecking et al., Gene 45:101 (1986); Cockett et al., Bio/Technology 8:2 (1990)).

[0267] In bacterial systems, a number of expression vectors may be advantageously selected depending upon the use intended for the antibody molecule being expressed. For example, when a large quantity of such a protein is to be produced, for the generation of pharmaceutical compositions of an antibody molecule, vectors which direct the expression of high levels of fusion protein products that are readily purified may be desirable. Such vectors include, but are not limited, to the E. coli expression vector pUR278 (Ruther et al., EMBO J. 2:1791 (1983)), in which the antibody coding sequence may be ligated individually into the vector in frame with the lac Z coding region so that a fusion protein is produced; pIN vectors (Inouye & Inouye, Nucleic Acids Res. 13:3101-3109 (1985); Van Heeke & Schuster, J. Biol. Chem. 24:5503-5509 (1989)); and the like. pGEX vectors may also be used to express foreign polypeptides as fusion proteins with glutathione S-transferase (GST). In general, such fusion proteins are soluble and can easily be purified from lysed cells by adsorption and binding to matrix glutathione-agarose beads followed by elution in the presence of free glutathione. The pGEX vectors are designed to include thrombin or factor Xa protease cleavage sites so that the cloned target gene product can be released from the GST moiety.

[0268] In an insect system, Autographa califomica nuclear polyhedrosis virus (AcNPV) is used as a vector to express foreign genes. The virus grows in Spodoptera frugiperda cells. The antibody coding sequence may be cloned individually into non-essential regions (for example the polyhedrin gene) of the virus and placed under control of an AcNPV promoter (for example the polyhedrin promoter).

[0269] In mammalian host cells, a number of viral-based expression systems may be utilized. In cases where an adenovirus is used as an expression vector, the antibody coding sequence of interest may be ligated to an adenovirus transcription/translation control complex, e.g., the late promoter and tripartite leader sequence. This chimeric gene may then be inserted in the adenovirus genome by in vitro or in vivo recombination. Insertion in a non-essential region of the viral genome (e.g., region E1 or E3) will result in a recombinant virus that is viable and capable of expressing the antibody molecule in infected hosts. (e.g., see Logan & Shenk, Proc. Natl. Acad. Sci. USA 81:355-359 (1984)). Specific initiation signals may also be required for efficient translation of inserted antibody coding sequences. These signals include the ATG initiation codon and adjacent sequences. Furthermore, the initiation codon must be in phase with the reading frame of the desired coding sequence to ensure translation of the entire insert. These exogenous translational control signals and initiation codons can be of a variety of origins, both natural and synthetic. The efficiency of expression may be enhanced by the inclusion of appropriate transcription enhancer elements, transcription terminators, etc. (see Bittner et al., Methods in Enzymol. 153:51-544 (1987)).

[0270] In addition, a host cell strain may be chosen which modulates the expression of the inserted sequences, or modifies and processes the gene product in the specific fashion desired. Such modifications (e.g., glycosylation) and processing (e.g., cleavage) of protein products may be important for the function of the protein. Different host cells have characteristic and specific mechanisms for the post-translational processing and modification of proteins and gene products. Appropriate cell lines or host systems can be chosen to ensure the correct modification and processing of the foreign protein expressed. To this end, eukaryotic host cells which possess the cellular machinery for proper processing of the primary transcript, glycosylation, and phosphorylation of the gene product may be used. Such mammalian host cells include but are not limited to CHO, VERY, BHK, Hela, COS, MDCK, 293, 3T3, W138, and in particular, breast cancer cell lines such as, for example, BT483, Hs578T, HTB2, BT20 and T47D, and normal mammary gland cell line such as, for example, CRL7030 and Hs578Bst.

[0271] For long-term, high-yield production of recombinant proteins, stable expression is preferred. For example, cell lines which stably express the antibody molecule may be engineered. Rather than using expression vectors which contain viral origins of replication, host cells can be transformed with DNA controlled by appropriate expression control elements (e.g., promoter, enhancer, sequences, transcription terminators, polyadenylation sites, etc.), and a selectable marker. Following the introduction of the foreign DNA, engineered cells may be allowed to grow for 1-2 days in an enriched media, and then are switched to a selective media. The selectable marker in the recombinant plasmid confers resistance to the selection and allows cells to stably integrate the plasmid into their chromosomes and grow to form foci which in turn can be cloned and expanded into cell lines. This method may advantageously be used to engineer cell lines which express the antibody molecule. Such engineered cell lines may be particularly useful in screening and evaluation of compounds that interact directly or indirectly with the antibody molecule.

[0272] A number of selection systems may be used, including but not limited to the herpes simplex virus thymidine kinase (Wigler et al., Cell 11:223 (1977)), hypoxanthine-guanine phosphoribosyltransferase (Szybalska & Szybalski, Proc. Natl. Acad. Sci. USA 48:202 (1992)), and adenine phosphoribosyltransferase (Lowy et al., Cell 22:817 (1980)) genes can be employed in tk-, hgprt- or aprt- cells, respectively. Also, antimetabolite resistance can be used as the basis of selection for the following genes: dhfr, which confers resistance to methotrexate (Wigler et al., Natl. Acad. Sci. USA 77:357 (1980); O'Hare et al., Proc. Natl. Acad. Sci. USA 78:1527 (1981)); gpt, which confers resistance to mycophenolic acid (Mulligan & Berg, Proc. Natl. Acad. Sci. USA 78:2072 (1981)); neo, which confers resistance to the aminoglycoside G-418 Clinical Pharmacy 12:488-505; Wu and Wu, Biotherapy 3:87-95 (1991); Tolstoshev, Ann. Rev. Pharmacol. Toxicol. 32:573-596 (1993); Mulligan, Science 260:926-932 (1993); and Morgan and Anderson, Ann. Rev. Biochem. 62:191-217 (1993); May, 1993, TIB TECH 11(5):155-215 (1993)); and hygro, which confers resistance to hygromycin (Santerre et al., Gene 30:147 (1984)). Methods commonly known in the art of recombinant DNA technology may be routinely applied to select the desired recombinant clone, and such methods are described, for example, in Ausubel et al. (eds.), Current Protocols in Molecular Biology, John Wiley & Sons, NY (1993); Kriegler, Gene Transfer and Expression, A Laboratory Manual, Stockton Press, NY (1990); and in Chapters 12 and 13, Dracopoli et al. (eds), Current Protocols in Human Genetics, John Wiley & Sons, NY (1994); Colberre-Garapin et al., J. Mol. Biol. 150:1 (1981), which are incorporated by reference herein in their entireties.

[0273] The expression levels of an antibody molecule can be increased by vector amplification (for a review, see Bebbington and Hentschel, The use of vectors based on gene amplification for the expression of cloned genes in mammalian cells in DNA cloning, Vol.3. (Academic Press, New York, 1987)). When a marker in the vector system expressing antibody is amplifiable, increase in the level of inhibitor present in culture of host cell will increase the number of copies of the marker gene. Since the amplified region is associated with the antibody gene, production of the antibody will also increase (Crouse et al., Mol. Cell. Biol. 3:257 (1983)).

[0274] Vectors which use glutamine synthase (GS) or DHFR as the selectable markers can be amplified in the presence of the drugs methionine sulphoximine or methotrexate, respectively. An advantage of glutamine synthase based vectors are the availabilty of cell lines (e.g., the murine myeloma cell line, NSO) which are glutamine synthase negative. Glutamine synthase expression systems can also function in glutamine synthase expressing cells (e.g. Chinese Hamster Ovary (CHO) cells) by providing additional inhibitor to prevent the functioning of the endogenous gene. A glutamine synthase expression system and components thereof are detailed in PCT publications: WO87/04462; WO86/05807; WO89/01036; WO89/10404; and WO91/06657 which are incorporated in their entireties by reference herein. Additionally, glutamine synthase expression vectors that may be used according to the present invention are commercially available from suplliers, including, for example Lonza Biologics, Inc. (Portsmouth, N.H.). Expression and production of monoclonal antibodies using a GS expression system in murine myeloma cells is described in Bebbington et al., Bio/technology 10:169(1992) and in Biblia and Robinson Biotechnol Prog. 11:1 (1995) which are incorporated in their entirities by reference herein.

[0275] The host cell may be co-transfected with two expression vectors of the invention, the first vector encoding a heavy chain derived polypeptide and the second vector encoding a light chain derived polypeptide. The two vectors may contain identical selectable markers which enable equal expression of heavy and light chain polypeptides. Alternatively, a single vector may be used which encodes, and is capable of expressing, both heavy and light chain polypeptides. In such situations, the light chain should be placed before the heavy chain to avoid an excess of toxic free heavy chain (Proudfoot, Nature 322:52 (1986); Kohler, Proc. Natl. Acad. Sci. USA 77:2197 (1980)). The coding sequences for the heavy and light chains may comprise cDNA or genomic DNA.

[0276] Once an antibody molecule of the invention has been produced by an animal, chemically synthesized, or recombinantly expressed, it may be purified by any method known in the art for purification of an immunoglobulin molecule, for example, by chromatography (e.g., ion exchange, affinity, particularly by affinity for the specific antigen after Protein A, and sizing column chromatography), centrifugation, differential solubility, or by any other standard technique for the purification of proteins. In addition, the antibodies of the present invention or fragments thereof can be fused to heterologous polypeptide sequences described herein or otherwise known in the art, to facilitate purification.

[0277] The present invention encompasses antibodies recombinantly fused or chemically conjugated (including both covalently and non-covalently conjugations) to a polypeptide (or portion thereof, preferably at least 10, 20, 30, 40, 50, 60, 70, 80, 90 or 100 amino acids of the polypeptide) of the present invention to generate fusion proteins. The fusion does not necessarily need to be direct, but may occur through linker sequences. The antibodies may be specific for antigens other than polypeptides (or portion thereof, preferably at least 10, 20, 30, 40, 50, 60, 70, 80, 90 or 100 amino acids of the polypeptide) of the present invention. For example, antibodies may be used to target the polypeptides of the present invention to particular cell types, either in vitro or in vivo, by fusing or conjugating the polypeptides of the present invention to antibodies specific for particular cell surface receptors. Antibodies fused or conjugated to the polypeptides of the present invention may also be used in in vitro immunoassays and purification methods using methods known in the art. See e.g., Harbor et al., supra, and PCT publication WO 93/21232; EP 439,095; Naramura et al., Immunol. Lett. 39:91-99 (1994); U.S. Pat. No. 5,474,981; Gillies et al., PNAS 89:1428-1432 (1992); Fell et al., J. Immunol. 146:2446-2452 (1991), which are incorporated by reference in their entireties.

[0278] The present invention further includes compositions comprising the polypeptides of the present invention fused or conjugated to antibody domains other than the variable regions. For example, the polypeptides of the present invention may be fused or conjugated to an antibody Fc region, or portion thereof. The antibody portion fused to a polypeptide of the present invention may comprise the constant region, hinge region, CH1 domain, CH2 domain, and CH3 domain or any combination of whole domains or portions thereof. The polypeptides may also be fused or conjugated to the above antibody portions to form multimers. For example, Fc portions fused to the polypeptides of the present invention can form dimers through disulfide bonding between the Fc portions. Higher multimeric forms can be made by fusing the polypeptides to portions of IgA and IgM. Methods for fusing or conjugating the polypeptides of the present invention to antibody portions are known in the art. See, e.g., U.S. Pat. Nos. 5,336,603; 5,622,929; 5,359,046; 5,349,053; 5,447,851; 5,112,946; EP 307,434; EP 367,166; PCT publications WO 96/04388; WO 91/06570; Ashkenazi et al., Proc. Natl. Acad. Sci. USA 88:10535-10539 (1991); Zheng et al., J. Immunol. 154:5590-5600 (1995); and Vil et al., Proc. Natl. Acad. Sci. USA 89:11337- 11341 (1992) (said references incorporated by reference in their entireties).

[0279] As discussed, supra, the polypeptides corresponding to a polypeptide, polypeptide fragment, or a variant of SEQ ID NO:Y may be fused or conjugated to the above antibody portions to increase the in vivo half life of the polypeptides or for use in immunoassays using methods known in the art. Further, the polypeptides corresponding to SEQ ID NO:Y may be fused or conjugated to the above antibody portions to facilitate purification. One reported example describes chimeric proteins consisting of the first two domains of the human CD4-polypeptide and various domains of the constant regions of the heavy or light chains of mammalian immunoglobulins. See EP 394,827; and Traunecker et al., Nature 331:84-86 (1988). The polypeptides of the present invention fused or conjugated to an antibody having disulfide- linked dimeric structures (due to the IgG) may also be more efficient in binding and neutralizing other molecules, than the monomeric secreted protein or protein fragment alone. See, for example, Fountoulakis et al., J. Biochem. 270:3958-3964 (1995). In many cases, the Fc part in a fusion protein is beneficial in therapy and diagnosis, and thus can result in, for example, improved pharmacokinetic properties. See, for example, EP A 232,262. Alternatively, deleting the Fc part after the fusion protein has been expressed, detected, and purified, would be desired. For example, the Fc portion may hinder therapy and diagnosis if the fusion protein is used as an antigen for immunizations. In drug discovery, for example, human proteins, such as hIL-5, have been fused with Fc portions for the purpose of high-throughput screening assays to identify antagonists of hIL-5. (See, Bennett et al., J. Molecular Recognition 8:52-58 (1995); Johanson et al., J. Biol. Chem. 270:9459-9471 (1995)).

[0280] Moreover, the antibodies or fragments thereof of the present invention can be fused to marker sequences, such as a peptide to facilitate purification. In preferred embodiments, the marker amino acid sequence is a hexa-histidine peptide, such as the tag provided in a pQE vector (QIAGEN, Inc., 9259 Eton Avenue, Chatsworth, Calif., 91311), among others, many of which are commercially available. As described in Gentz et al., Proc. Natl. Acad. Sci. USA 86:821-824 (1989), for instance, hexa-histidine provides for convenient purification of the fusion protein. Other peptide tags useful for purification include, but are not limited to, the “HA” tag, which corresponds to an epitope derived from the influenza hemagglutinin protein (Wilson et al., Cell 37:767 (1984)) and the “flag” tag.

[0281] The present invention further encompasses antibodies or fragments thereof conjugated to a diagnostic or therapeutic agent. The antibodies can be used diagnostically to, for example, monitor the development or progression of a tumor as part of a clinical testing procedure to, e.g., determine the efficacy of a given treatment regimen. Detection can be facilitated by coupling the antibody to a detectable substance. Examples of detectable substances include various enzymes, prosthetic groups, fluorescent materials, luminescent materials, bioluminescent materials, radioactive materials, positron emitting metals using various positron emission tomographies, and nonradioactive paramagnetic metal ions. The detectable substance may be coupled or conjugated either directly to the antibody (or fragment thereof) or indirectly, through an intermediate (such as, for example, a linker known in the art) using techniques known in the art. See, for example, U.S. Pat. No. 4,741,900 for metal ions which can be conjugated to antibodies for use as diagnostics according to the present invention. Examples of suitable enzymes include horseradish peroxidase, alkaline phosphatase, beta-galactosidase, or acetylcholinesterase; examples of suitable prosthetic group complexes include streptavidin/biotin and avidin/biotin; examples of suitable fluorescent materials include umbelliferone, fluorescein, fluorescein isothiocyanate, rhodamine, dichlorotriazinylamine fluorescein, dansyl chloride or phycoerythrin; an example of a luminescent material includes luminol; examples of bioluminescent materials include luciferase, luciferin, and aequorin; and examples of suitable radioactive material include 125I, 131I, 111In or 99Tc.

[0282] Further, an antibody or fragment thereof may be conjugated to a therapeutic moiety such as a cytotoxin, e.g., a cytostatic or cytocidal agent, a therapeutic agent or a radioactive metal ion, e.g., alpha-emitters such as, for example, 213Bi. A cytotoxin or cytotoxic agent includes any agent that is detrimental to cells. Examples include paclitaxol, cytochalasin B, gramicidin D, ethidium bromide, emetine, mitomycin, etoposide, tenoposide, vincristine, vinblastine, colchicin, doxorubicin, daunorubicin, dihydroxy anthracin dione, mitoxantrone, mithramycin, actinomycin D, 1-dehydrotestosterone, glucocorticoids, procaine, tetracaine, lidocaine, propranolol, and puromycin and analogs or homologs thereof. Therapeutic agents include, but are not limited to, antimetabolites (e.g., methotrexate, 6-mercaptopurine, 6-thioguanine, cytarabine, 5-fluorouracil decarbazine), alkylating agents (e.g., mechlorethamine, thioepa chlorambucil, melphalan, carmustine (BSNU) and lomustine (CCNU), cyclothosphamide, busulfan, dibromomannitol, streptozotocin, mitomycin C, and cis- dichlorodiamine platinum (II) (DDP) cisplatin), anthracyclines (e.g., daunorubicin (formerly daunomycin) and doxorubicin), antibiotics (e.g., dactinomycin (formerly actinomycin), bleomycin, mithramycin, and anthramycin (AMC)), and anti-mitotic agents (e.g., vincristine and vinblastine).

[0283] The conjugates of the invention can be used for modifying a given biological response, the therapeutic agent or drug moiety is not to be construed as limited to classical chemical therapeutic agents. For example, the drug moiety may be a protein or polypeptide possessing a desired biological activity. Such proteins may include, for example, a toxin such as abrin, ricin A, pseudomonas exotoxin, or diphtheria toxin; a protein such as tumor necrosis factor, α-interferon, β-interferon, nerve growth factor, platelet derived growth factor, tissue plasminogen activator, an apoptotic agent, e.g., TNF-alpha, TNF-beta, AIM I (See, International Publication No. WO 97/33899), AIM II (See, International Publication No. WO 97/34911), Fas Ligand (Takahashi et al., Int. Immunol., 6:1567-1574 (1994)), VEGI (See, International Publication No. WO 99/23105), a thrombotic agent or an anti- angiogenic agent, e.g., angiostatin or endostatin; or, biological response modifiers such as, for example, lymphokines, interleukin-1 (“IL-1”), interleukin-2 (“IL-2”), interleukin-6 (“IL-6”), granulocyte macrophage colony stimulating factor (“GM-CSF”), granulocyte colony stimulating factor (“G-CSF”), or other growth factors.

[0284] Antibodies may also be attached to solid supports, which are particularly useful for immunoassays or purification of the target antigen. Such solid supports include, but are not limited to, glass, cellulose, polyacrylamide, nylon, polystyrene, polyvinyl chloride or polypropylene.

[0285] Techniques for conjugating such therapeutic moiety to antibodies are well known. See, for example, Arnon et al., “Monoclonal Antibodies For Immunotargeting Of Drugs In Cancer Therapy”, in Monoclonal Antibodies And Cancer Therapy, Reisfeld et al. (eds.), pp. 243-56 (Alan R. Liss, Inc. 1985); Hellstrom et al., “Antibodies For Drug Delivery”, in Controlled Drug Delivery (2nd Ed.), Robinson et al. (eds.), pp. 623-53 (Marcel Dekker, Inc. 1987); Thorpe, “Antibody Carriers Of Cytotoxic Agents In Cancer Therapy: A Review”, in Monoclonal Antibodies '84: Biological And Clinical Applications, Pinchera et al. (eds.), pp. 475-506 (1985); “Analysis, Results, And Future Prospective Of The Therapeutic Use Of Radiolabeled Antibody In Cancer Therapy”, in Monoclonal Antibodies For Cancer Detection And Therapy, Baldwin et al. (eds.), pp. 303-16 (Academic Press 1985), and Thorpe et al., “The Preparation And Cytotoxic Properties Of Antibody-Toxin Conjugates”, Immunol. Rev. 62:119-58 (1982).

[0286] Alternatively, an antibody can be conjugated to a second antibody to form an antibody heteroconjugate as described by Segal in U.S. Pat. No. 4,676,980, which is incorporated herein by reference in its entirety.

[0287] An antibody, with or without a therapeutic moiety conjugated to it, administered alone or in combination with cytotoxic factor(s) and/or cytokine(s) can be used as a therapeutic.

[0288] Immunophenotyping

[0289] The antibodies of the invention may be utilized for immunophenotyping of cell lines and biological samples. Translation products of the gene of the present invention may be useful as cell-specific markers, or more specifically as cellular markers that are differentially expressed at various stages of differentiation and/or maturation of particular cell types. Monoclonal antibodies directed against a specific epitope, or combination of epitopes, will allow for the screening of cellular populations expressing the marker. Various techniques can be utilized using monoclonal antibodies to screen for cellular populations expressing the marker(s), and include magnetic separation using antibody-coated magnetic beads, “panning” with antibody attached to a solid matrix (i.e., plate), and flow cytometry (See, e.g., U.S. Pat. No. 5,985,660; and Morrison et al., Cell, 96:737-49 (1999)).

[0290] These techniques allow for the screening of particular populations of cells, such as might be found with hematological malignancies (i.e. minimal residual disease (MRD) in acute leukemic patients) and “non-self” cells in transplantations to prevent Graft-versus-Host Disease (GVHD). Alternatively, these techniques allow for the screening of hematopoietic stem and progenitor cells capable of undergoing proliferation and/or differentiation, as might be found in human umbilical cord blood.

[0291] Assays For Antibody Binding

[0292] The antibodies of the invention may be assayed for immunospecific binding by any method known in the art. The immunoassays which can be used include but are not limited to competitive and non-competitive assay systems using techniques such as western blots, radioimmunoassays, ELISA (enzyme linked immunosorbent assay), “sandwich” immunoassays, immunoprecipitation assays, precipitin reactions, gel diffusion precipitin reactions, immunodiffusion assays, agglutination assays, complement-fixation assays, immunoradiometric assays, fluorescent immunoassays, and protein A immunoassays, to name but a few. Such assays are routine and well known in the art (see, e.g., Ausubel et al, eds, 1994, Current Protocols in Molecular Biology, Vol. 1, John Wiley & Sons, Inc., New York, which is incorporated by reference herein in its entirety). Exemplary immunoassays are described briefly below (but are not intended by way of limitation).

[0293] Immunoprecipitation protocols generally comprise lysing a population of cells in a lysis buffer such as RIPA buffer (1% NP-40 or Triton X-100, 1% sodium deoxycholate, 0.1% SDS, 0.15 M NaCl, 0.01 M sodium phosphate at pH 7.2, 1% Trasylol) supplemented with protein phosphatase and/or protease inhibitors (e.g., EDTA, PMSF, aprotinin, sodium vanadate), adding the antibody of interest to the cell lysate, incubating for a period of time (e.g., 1-4 hours) at 4° C., adding protein A and/or protein G sepharose beads to the cell lysate, incubating for about an hour or more at 4° C., washing the beads in lysis buffer and resuspending the beads in SDS/sample buffer. The ability of the antibody of interest to immunoprecipitate a particular antigen can be assessed by, e.g., western blot analysis. One of skill in the art would be knowledgeable as to the parameters that can be modified to increase the binding of the antibody to an antigen and decrease the background (e.g., pre-clearing the cell lysate with sepharose beads). For further discussion regarding immunoprecipitation protocols see, e.g., Ausubel et al., eds., (1994), Current Protocols in Molecular Biology, Vol. 1, John Wiley & Sons, Inc., New York, section 10.16.1.

[0294] Western blot analysis generally comprises preparing protein samples, electrophoresis of the protein samples in a polyacrylamide gel (e.g., 8%- 20% SDS-PAGE depending on the molecular weight of the antigen), transferring the protein sample from the polyacrylamide gel to a membrane such as nitrocellulose, PVDF or nylon, blocking the membrane in blocking solution (e.g., PBS with 3% BSA or non-fat milk), washing the membrane in washing buffer (e.g., PBS-Tween 20), blocking the membrane with primary antibody (the antibody of interest) diluted in blocking buffer, washing the membrane in washing buffer, blocking the membrane with a secondary antibody (which recognizes the primary antibody, e.g., an anti-human antibody) conjugated to an enzymatic substrate (e.g., horseradish peroxidase or alkaline phosphatase) or radioactive molecule (e.g., 32P or 125I) diluted in blocking buffer, washing the membrane in wash buffer, and detecting the presence of the antigen. One of skill in the art would be knowledgeable as to the parameters that can be modified to increase the signal detected and to reduce the background noise. For further discussion regarding western blot protocols see, e.g., Ausubel et al, eds, (1994), Current Protocols in Molecular Biology, Vol. 1, John Wiley & Sons, Inc., New York, section 10.8.1.

[0295] ELISAs comprise preparing antigen, coating the well of a 96 well microtiter plate with the antigen, adding the antibody of interest conjugated to a detectable compound such as an enzymatic substrate (e.g., horseradish peroxidase or alkaline phosphatase) to the well and incubating for a period of time, and detecting the presence of the antigen. In ELISAs the antibody of interest does not have to be conjugated to a detectable compound; instead, a second antibody (which recognizes the antibody of interest) conjugated to a detectable compound may be added to the well. Further, instead of coating the well with the antigen, the antibody may be coated to the well. In this case, a second antibody conjugated to a detectable compound may be added following the addition of the antigen of interest to the coated well. One of skill in the art would be knowledgeable as to the parameters that can be modified to increase the signal detected as well as other variations of ELISAs known in the art. For further discussion regarding ELISAs see, e.g., Ausubel et al, eds, (1994), Current Protocols in Molecular Biology, Vol. 1, John Wiley & Sons, Inc., New York, section 1 1.2.1.

[0296] The binding affinity of an antibody to an antigen and the off-rate of an antibody-antigen interaction can be determined by competitive binding assays. One example of a competitive binding assay is a radioimmunoassay comprising the incubation of labeled antigen (e.g., 3H or 125I) with the antibody of interest in the presence of increasing amounts of unlabeled antigen, and the detection of the antibody bound to the labeled antigen. The affinity of the antibody of interest for a particular antigen and the binding off-rates can be determined from the data by scatchard plot analysis. Competition with a second antibody can also be determined using radioimmunoassays. In this case, the antigen is incubated with antibody of interest conjugated to a labeled compound (e.g., 3H or 125I) in the presence of increasing amounts of an unlabeled second antibody.

[0297] Antibodies of the invention may be characterized using immunocytochemisty methods on cells (e.g., mammalian cells, such as CHO cells) transfected with a vector enabling the expression of an antigen or with vector alone using techniques commonly known in the art. Antibodies that bind antigen transfected cells, but not vector-only transfected cells, are antigen specific.

[0298] Therapeutic Uses

[0299] The present invention is further directed to antibody-based therapies which involve administering antibodies of the invention to an animal, preferably a mammal, and most preferably a human, patient for treating one or more of the disclosed diseases, disorders, or conditions. Therapeutic compounds of the invention include, but are not limited to, antibodies of the invention (including fragments, analogs and derivatives thereof as described herein) and nucleic acids encoding antibodies of the invention (including fragments, analogs and derivatives thereof and anti-idiotypic antibodies as described herein). The antibodies of the invention can be used to treat, inhibit or prevent diseases, disorders or conditions associated with aberrant expression and/or activity of a polypeptide of the invention, including, but not limited to, any one or more of the diseases, disorders, or conditions described herein. The treatment and/or prevention of diseases, disorders, or conditions associated with aberrant expression and/or activity of a polypeptide of the invention includes, but is not limited to, alleviating symptoms associated with those diseases, disorders or conditions. Antibodies of the invention may be provided in pharmaceutically acceptable compositions as known in the art or as described herein.

[0300] In a specific and preferred embodiment, the present invention is directed to antibody-based therapies which involve administering antibodies of the invention to an animal, preferably a mammal, and most preferably a human, patient for treating one or more diseases, disorders, or conditions, including but not limited to: neural disorders, immune system disorders, muscular disorders, reproductive disorders, gastrointestinal disorders, pulmonary disorders, cardiovascular disorders, renal disorders, proliferative disorders, and/or cancerous diseases and conditions., and/or as described elsewhere herein. Therapeutic compounds of the invention include, but are not limited to, antibodies of the invention (e.g., antibodies directed to the full length protein expressed on the cell surface of a mammalian cell; antibodies directed to an epitope of a polypeptide of the invention (such as, for example, a predicted linear epitope shown in column 7 of Table 1A; or a conformational epitope, including fragments, analogs and derivatives thereof as described herein) and nucleic acids encoding antibodies of the invention (including fragments, analogs and derivatives thereof and anti-idiotypic antibodies as described herein). The antibodies of the invention can be used to treat, inhibit or prevent diseases, disorders or conditions associated with aberrant expression and/or activity of a polypeptide of the invention, including, but not limited to, any one or more of the diseases, disorders, or conditions described herein. The treatment and/or prevention of diseases, disorders, or conditions associated with aberrant expression and/or activity of a polypeptide of the invention includes, but is not limited to, alleviating symptoms associated with those diseases, disorders or conditions. Antibodies of the invention may be provided in pharmaceutically acceptable compositions as known in the art or as described herein.

[0301] A summary of the ways in which the antibodies of the present invention may be used therapeutically includes binding polynucleotides or polypeptides of the present invention locally or systemically in the body or by direct cytotoxicity of the antibody, e.g. as mediated by complement (CDC) or by effector cells (ADCC). Some of these approaches are described in more detail below. Armed with the teachings provided herein, one of ordinary skill in the art will know how to use the antibodies of the present invention for diagnostic, monitoring or therapeutic purposes without undue experimentation.

[0302] The antibodies of this invention may be advantageously utilized in combination with other monoclonal or chimeric antibodies, or with lymphokines or hematopoietic growth factors (such as, e.g., IL-2, IL-3 and IL-7), for example, which serve to increase the number or activity of effector cells which interact with the antibodies.

[0303] The antibodies of the invention may be administered alone or in combination with other types of treatments (e.g., radiation therapy, chemotherapy, hormonal therapy, immunotherapy and anti-tumor agents). Generally, administration of products of a species origin or species reactivity (in the case of antibodies) that is the same species as that of the patient is preferred. Thus, in a preferred embodiment, human antibodies, fragments derivatives, analogs, or nucleic acids, are administered to a human patient for therapy or prophylaxis.

[0304] It is preferred to use high affinity and/or potent in vivo inhibiting and/or neutralizing antibodies against polypeptides or polynucleotides of the present invention, fragments or regions thereof, for both immunoassays directed to and therapy of disorders related to polynucleotides or polypeptides, including fragments thereof, of the present invention. Such antibodies, fragments, or regions, will preferably have an affinity for polynucleotides or polypeptides of the invention, including fragments thereof. Preferred binding affinities include those with a dissociation constant or Kd less than 5×10⁻² M, 10⁻² M, 5×10⁻³ M, 10⁻³M, 5×10⁻⁴ M, 10⁻⁴ M, 5×10⁻⁵ M, 10⁻⁵ M, 5×10⁻⁶ M, 10⁻⁶ M, 5×10⁻⁷ M, 10⁻⁷ M, 5×10⁻⁸ M, 10⁻⁸ M, 5×10⁻⁹ M, 10⁻⁹ M, 5×10⁻¹⁰ M, 10⁻¹⁰ M, 5×10⁻¹¹ M, 10⁻¹¹ M, 5×10⁻¹² M, 10⁻¹² M, 5×10⁻¹³ M, 10⁻¹³ M, 5×10⁻¹⁴ M, 10⁻¹⁴ M, 5×10⁻¹⁵ M, and 10⁻¹⁵ M.

[0305] Gene Therapy

[0306] In a specific embodiment, nucleic acids comprising sequences encoding antibodies or functional derivatives thereof, are administered to treat, inhibit or prevent a disease or disorder associated with aberrant expression and/or activity of a polypeptide of the invention, by way of gene therapy. Gene therapy refers to therapy performed by the administration to a subject of an expressed or expressible nucleic acid. In this embodiment of the invention, the nucleic acids produce their encoded protein that mediates a therapeutic effect.

[0307] Any of the methods for gene therapy available in the art can be used according to the present invention. Exemplary methods are described below.

[0308] For general reviews of the methods of gene therapy, see Goldspiel et al., Clinical Pharmacy 12:488-505 (1993); Wu and Wu, Biotherapy 3:87-95 (1991); Tolstoshev, Ann. Rev. Pharmacol. Toxicol. 32:573-596 (1993); Mulligan, Science 260:926-932 (1993); and Morgan and Anderson, Ann. Rev. Biochem. 62:191-217 (1993); May, TIBTECH 11(5):155-215 (1993). Methods commonly known in the art of recombinant DNA technology which can be used are described in Ausubel et al. (eds.), Current Protocols in Molecular Biology, John Wiley & Sons, NY (1993); and Kriegler, Gene Transfer and Expression, A Laboratory Manual, Stockton Press, NY (1990).

[0309] In a preferred embodiment, the compound comprises nucleic acid sequences encoding an antibody, said nucleic acid sequences being part of expression vectors that express the antibody or fragments or chimeric proteins or heavy or light chains thereof in a suitable host. In particular, such nucleic acid sequences have promoters operably linked to the antibody coding region, said promoter being inducible or constitutive, and, optionally, tissue-specific. In another particular embodiment, nucleic acid molecules are used in which the antibody coding sequences and any other desired sequences are flanked by regions that promote homologous recombination at a desired site in the genome, thus providing for intrachromosomal expression of the antibody encoding nucleic acids (Koller and Smithies, Proc. Natl. Acad. Sci. USA 86:8932-8935 (1989); Zijlstra et al., Nature 342:435-438 (1989). In specific embodiments, the expressed antibody molecule is a single chain antibody; alternatively, the nucleic acid sequences include sequences encoding both the heavy and light chains, or fragments thereof, of the antibody.

[0310] Delivery of the nucleic acids into a patient may be either direct, in which case the patient is directly exposed to the nucleic acid or nucleic acid- carrying vectors, or indirect, in which case, cells are first transformed with the nucleic acids in vitro, then transplanted into the patient. These two approaches are known, respectively, as in vivo or ex vivo gene therapy.

[0311] In a specific embodiment, the nucleic acid sequences are directly administered in vivo, where it is expressed to produce the encoded product. This can be accomplished by any of numerous methods known in the art, e.g., by constructing them as part of an appropriate nucleic acid expression vector and administering it so that they become intracellular, e.g., by infection using defective or attenuated retrovirals or other viral vectors (see U.S. Pat. No. 4,980,286), or by direct injection of naked DNA, or by use of microparticle bombardment (e.g., a gene gun; Biolistic, Dupont), or coating with lipids or cell-surface receptors or transfecting agents, encapsulation in liposomes, microparticles, or microcapsules, or by administering them in linkage to a peptide which is known to enter the nucleus, by administering it in linkage to a ligand subject to receptor-mediated endocytosis (see, e.g., Wu and Wu, J. Biol. Chem. 262:4429-4432 (1987)) (which can be used to target cell types specifically expressing the receptors), etc. In another embodiment, nucleic acid-ligand complexes can be formed in which the ligand comprises a fusogenic viral peptide to disrupt endosomes, allowing the nucleic acid to avoid lysosomal degradation. In yet another embodiment, the nucleic acid can be targeted in vivo for cell specific uptake and expression, by targeting a specific receptor (see, e.g., PCT Publications WO 92/06180; WO 92/22635; WO92/20316; W093/14188, WO 93/20221). Alternatively, the nucleic acid can be introduced intracellularly and incorporated within host cell DNA for expression, by homologous recombination (Koller and Smithies, Proc. Natl. Acad. Sci. USA 86:8932-8935 (1989); Zijlstra et al., Nature 342:435-438 (1989)).

[0312] In a specific embodiment, viral vectors that contains nucleic acid sequences encoding an antibody of the invention are used. For example, a retroviral vector can be used (see Miller et al., Meth. Enzymol. 217:581-599 (1993)). These retroviral vectors contain the components necessary for the correct packaging of the viral genome and integration into the host cell DNA. The nucleic acid sequences encoding the antibody to be used in gene therapy are cloned into one or more vectors, which facilitates delivery of the gene into a patient. More detail about retroviral vectors can be found in Boesen et al., Biotherapy 6:291-302 (1994), which describes the use of a retroviral vector to deliver the mdrl gene to hematopoietic stem cells in order to make the stem cells more resistant to chemotherapy. Other references illustrating the use of retroviral vectors in gene therapy are: Clowes et al., J. Clin. Invest. 93:644-651 (1994); Kiem et al., Blood 83:1467-1473 (1994); Salmons and Gunzberg, Human Gene Therapy 4:129-141 (1993); and Grossman and Wilson, Curr. Opin. in Genetics and Devel. 3:110-114 (1993).

[0313] Adenoviruses are other viral vectors that can be used in gene therapy. Adenoviruses are especially attractive vehicles for delivering genes to respiratory epithelia. Adenoviruses naturally infect respiratory epithelia where they cause a mild disease. Other targets for adenovirus-based delivery systems are liver, the central nervous system, endothelial cells, and muscle. Adenoviruses have the advantage of being capable of infecting non-dividing cells. Kozarsky and Wilson, Current Opinion in Genetics and Development 3:499-503 (1993) present a review of adenovirus-based gene therapy. Bout et al., Human Gene Therapy 5:3-10 (1994) demonstrated the use of adenovirus vectors to transfer genes to the respiratory epithelia of rhesus monkeys. Other instances of the use of adenoviruses in gene therapy can be found in Rosenfeld et al., Science 252:431-434 (1991); Rosenfeld et al., Cell 68:143- 155 (1992); Mastrangeli et al., J. Clin. Invest. 91:225-234 (1993); PCT Publication WO94/12649; and Wang, et al., Gene Therapy 2:775-783 (1995). In a preferred embodiment, adenovirus vectors are used.

[0314] Adeno-associated virus (AAV) has also been proposed for use in gene therapy (Walsh et al., Proc. Soc. Exp. Biol. Med. 204:289-300 (1993); U.S. Pat. No. 5,436,146).

[0315] Another approach to gene therapy involves transferring a gene to cells in tissue culture by such methods as electroporation, lipofection, calcium phosphate mediated transfection, or viral infection. Usually, the method of transfer includes the transfer of a selectable marker to the cells. The cells are then placed under selection to isolate those cells that have taken up and are expressing the transferred gene. Those cells are then delivered to a patient.

[0316] In this embodiment, the nucleic acid is introduced into a cell prior to administration in vivo of the resulting recombinant cell. Such introduction can be carried out by any method known in the art, including but not limited to transfection, electroporation, microinjection, infection with a viral or bacteriophage vector containing the nucleic acid sequences, cell fusion, chromosome-mediated gene transfer, microcell-mediated gene transfer, spheroplast fusion, etc. Numerous techniques are known in the art for the introduction of foreign genes into cells (see, e.g., Loeffler and Behr, Meth. Enzymol. 217:599-618 (1993); Cohen et al., Meth. Enzymol. 217:618-644 (1993); Cline, Pharmac. Ther. 29:69-92m (1985) and may be used in accordance with the present invention, provided that the necessary developmental and physiological functions of the recipient cells are not disrupted. The technique should provide for the stable transfer of the nucleic acid to the cell, so that the nucleic acid is expressible by the cell and preferably heritable and expressible by its cell progeny.

[0317] The resulting recombinant cells can be delivered to a patient by various methods known in the art. Recombinant blood cells (e.g., hematopoietic stem or progenitor cells) are preferably administered intravenously. The amount of cells envisioned for use depends on the desired effect, patient state, etc., and can be determined by one skilled in the art.

[0318] Cells into which a nucleic acid can be introduced for purposes of gene therapy encompass any desired, available cell type, and include but are not limited to epithelial cells, endothelial cells, keratinocytes, fibroblasts, muscle cells, hepatocytes; blood cells such as T lymphocytes, B lymphocytes, monocytes, macrophages, neutrophils, eosinophils, megakaryocytes, granulocytes; various stem or progenitor cells, in particular hematopoietic stem or progenitor cells, e.g., as obtained from bone marrow, umbilical cord blood, peripheral blood, fetal liver, etc.

[0319] In a preferred embodiment, the cell used for gene therapy is autologous to the patient.

[0320] In an embodiment in which recombinant cells are used in gene therapy, nucleic acid sequences encoding an antibody are introduced into the cells such that they are expressible by the cells or their progeny, and the recombinant cells are then administered in vivo for therapeutic effect. In a specific embodiment, stem or progenitor cells are used. Any stem and/or progenitor cells which can be isolated and maintained in vitro can potentially be used in accordance with this embodiment of the present invention (see e.g. PCT Publication WO 94/08598; Stemple and Anderson, Cell 71:973-985 (1992); Rheinwald, Meth. Cell Bio. 21A:229 (1980); and Pittelkow and Scott, Mayo Clinic Proc. 61:771 (1986)).

[0321] In a specific embodiment, the nucleic acid to be introduced for purposes of gene therapy comprises an inducible promoter operably linked to the coding region, such that expression of the nucleic acid is controllable by the presence or absence of an appropriate inducer of transcription.

[0322] Demonstration of Therapeutic or Prophylactic Activity

[0323] The compounds or pharmaceutical compositions of the invention are preferably tested in vitro, and then in vivo for the desired therapeutic or prophylactic activity, prior to use in humans. For example, in vitro assays to demonstrate the therapeutic or prophylactic utility of a compound or pharmaceutical composition include, the effect of a compound on a cell line or a patient tissue sample. The effect of the compound or composition on the cell line and/or tissue sample can be determined utilizing techniques known to those of skill in the art including, but not limited to, rosette formation assays and cell lysis assays. In accordance with the invention, in vitro assays which can be used to determine whether administration of a specific compound is indicated, include in vitro cell culture assays in which a patient tissue sample is grown in culture, and exposed to or otherwise administered a compound, and the effect of such compound upon the tissue sample is observed.

[0324] Therapeutic/Prophylactic Administration and Composition

[0325] The invention provides methods of treatment, inhibition and prophylaxis by administration to a subject of an effective amount of a compound or pharmaceutical composition of the invention, preferably a polypeptide or antibody of the invention. In a preferred embodiment, the compound is substantially purified (e.g., substantially free from substances that limit its effect or produce undesired side-effects). The subject is preferably an animal, including but not limited to animals such as cows, pigs, horses, chickens, cats, dogs, etc., and is preferably a mammal, and most preferably human.

[0326] Formulations and methods of administration that can be employed when the compound comprises a nucleic acid or an immunoglobulin are described above; additional appropriate formulations and routes of administration can be selected from among those described herein below.

[0327] Various delivery systems are known and can be used to administer a compound of the invention, e.g., encapsulation in liposomes, microparticles, microcapsules, recombinant cells capable of expressing the compound, receptor-mediated endocytosis (see, e.g., Wu and Wu, J. Biol. Chem. 262:4429-4432 (1987)), construction of a nucleic acid as part of a retroviral or other vector, etc. Methods of introduction include but are not limited to intradermal, intramuscular, intraperitoneal, intravenous, subcutaneous, intranasal, epidural, and oral routes. The compounds or compositions may be administered by any convenient route, for example by infusion or bolus injection, by absorption through epithelial or mucocutaneous linings (e.g., oral mucosa, rectal and intestinal mucosa, etc.) and may be administered together with other biologically active agents. Administration can be systemic or local. In addition, it may be desirable to introduce the pharmaceutical compounds or compositions of the invention into the central nervous system by any suitable route, including intraventricular and intrathecal injection; intraventricular injection may be facilitated by an intraventricular catheter, for example, attached to a reservoir, such as an Ommaya reservoir. Pulmonary administration can also be employed, e.g., by use of an inhaler or nebulizer, and formulation with an aerosolizing agent.

[0328] In a specific embodiment, it may be desirable to administer the pharmaceutical compounds or compositions of the invention locally to the area in need of treatment; this may be achieved by, for example, and not by way of limitation, local infusion during surgery, topical application, e.g., in conjunction with a wound dressing after surgery, by injection, by means of a catheter, by means of a suppository, or by means of an implant, said implant being of a porous, non-porous, or gelatinous material, including membranes, such as sialastic membranes, or fibers. Preferably, when administering a protein, including an antibody, of the invention, care must be taken to use materials to which the protein does not absorb.

[0329] In another embodiment, the compound or composition can be delivered in a vesicle, in particular a liposome (see Langer, Science 249:1527-1533 (1990); Treat et al., in Liposomes in the Therapy of Infectious Disease and Cancer, Lopez-Berestein and Fidler (eds.), Liss, New York, pp. 353- 365 (1989); Lopez-Berestein, ibid., pp. 317-327; see generally ibid.)

[0330] In yet another embodiment, the compound or composition can be delivered in a controlled release system. In one embodiment, a pump may be used (see Langer, supra; Sefton, CRC Crit. Ref. Biomed. Eng. 14:201 (1987); Buchwald et al., Surgery 88:507 (1980); Saudek et al., N. Engl. J. Med. 321:574 (1989)). In another embodiment, polymeric materials can be used (see Medical Applications of Controlled Release, Langer and Wise (eds.), CRC Pres., Boca Raton, Fla. (1974); Controlled Drug Bioavailability, Drug Product Design and Performance, Smolen and Ball (eds.), Wiley, New York (1984); Ranger and Peppas, J., Macromol. Sci. Rev. Macromol. Chem. 23:61 (1983); see also Levy et al., Science 228:190 (1985); During et al., Ann. Neurol. 25:351 (1989); Howard et al., J.Neurosurg. 71:105 (1989)). In yet another embodiment, a controlled release system can be placed in proximity of the therapeutic target, e.g., the brain, thus requiring only a fraction of the systemic dose (see, e.g., Goodson, in Medical Applications of Controlled Release, supra, vol. 2, pp. 115-138 (1984)).

[0331] Other controlled release systems are discussed in the review by Langer (Science 249:1527-1533 (1990)).

[0332] In a specific embodiment where the compound of the invention is a nucleic acid encoding a protein, the nucleic acid can be administered in vivo to promote expression of its encoded protein, by constructing it as part of an appropriate nucleic acid expression vector and administering it so that it becomes intracellular, e.g., by use of a retroviral vector (see U.S. Pat. No. 4,980,286), or by direct injection, or by use of microparticle bombardment (e.g., a gene gun; Biolistic, Dupont), or coating with lipids or cell-surface receptors or transfecting agents, or by administering it in linkage to a homeobox- like peptide which is known to enter the nucleus (see e.g., Joliot et al., Proc. Natl. Acad. Sci. USA 88:1864-1868 (1991)), etc. Alternatively, a nucleic acid can be introduced intracellularly and incorporated within host cell DNA for expression, by homologous recombination.

[0333] The present invention also provides pharmaceutical compositions. Such compositions comprise a therapeutically effective amount of a compound, and a pharmaceutically acceptable carrier. In a specific embodiment, the term “pharmaceutically acceptable” means approved by a regulatory agency of the Federal or a state government or listed in the U.S. Pharmacopeia or other generally recognized pharmacopeia for use in animals, and more particularly in humans. The term “carrier” refers to a diluent, adjuvant, excipient, or vehicle with which the therapeutic is administered. Such pharmaceutical carriers can be sterile liquids, such as water and oils, including those of petroleum, animal, vegetable or synthetic origin, such as peanut oil, soybean oil, mineral oil, sesame oil and the like. Water is a preferred carrier when the pharmaceutical composition is administered intravenously. Saline solutions and aqueous dextrose and glycerol solutions can also be employed as liquid carriers, particularly for injectable solutions. Suitable pharmaceutical excipients include starch, glucose, lactose, sucrose, gelatin, malt, rice, flour, chalk, silica gel, sodium stearate, glycerol monostearate, talc, sodium chloride, dried skim milk, glycerol, propylene, glycol, water, ethanol and the like. The composition, if desired, can also contain minor amounts of wetting or emulsifying agents, or pH buffering agents. These compositions can take the form of solutions, suspensions, emulsion, tablets, pills, capsules, powders, sustained-release formulations and the like. The composition can be formulated as a suppository, with traditional binders and carriers such as triglycerides. Oral formulation can include standard carriers such as pharmaceutical grades of mannitol, lactose, starch, magnesium stearate, sodium saccharine, cellulose, magnesium carbonate, etc. Examples of suitable pharmaceutical carriers are described in “Remington's Pharmaceutical Sciences” by E. W. Martin. Such compositions will contain a therapeutically effective amount of the compound, preferably in purified form, together with a suitable amount of carrier so as to provide the form for proper administration to the patient. The formulation should suit the mode of administration.

[0334] In a preferred embodiment, the composition is formulated in accordance with routine procedures as a pharmaceutical composition adapted for intravenous administration to human beings. Typically, compositions for intravenous administration are solutions in sterile isotonic aqueous buffer. Where necessary, the composition may also include a solubilizing agent and a local anesthetic such as lignocaine to ease pain at the site of the injection. Generally, the ingredients are supplied either separately or mixed together in unit dosage form, for example, as a dry lyophilized powder or water free concentrate in a hermetically sealed container such as an ampoule or sachette indicating the quantity of active agent. Where the composition is to be administered by infusion, it can be dispensed with an infusion bottle containing sterile pharmaceutical grade water or saline. Where the composition is administered by injection, an ampoule of sterile water for injection or saline can be provided so that the ingredients may be mixed prior to administration.

[0335] The compounds of the invention can be formulated as neutral or salt forms. Pharmaceutically acceptable salts include those formed with anions such as those derived from hydrochloric, phosphoric, acetic, oxalic, tartaric acids, etc., and those formed with cations such as those derived from sodium, potassium, ammonium, calcium, ferric hydroxides, isopropylamine, triethylamine, 2-ethylamino ethanol, histidine, procaine, etc.

[0336] The amount of the compound of the invention which will be effective in the treatment, inhibition and prevention of a disease or disorder associated with aberrant expression and/or activity of a polypeptide of the invention can be determined by standard clinical techniques. In addition, in vitro assays may optionally be employed to help identify optimal dosage ranges. The precise dose to be employed in the formulation will also depend on the route of administration, and the seriousness of the disease or disorder, and should be decided according to the judgment of the practitioner and each patient's circumstances. Effective doses may be extrapolated from dose-response curves derived from in vitro or animal model test systems.

[0337] For antibodies, the dosage administered to a patient is typically 0.1 mg/kg to 100 mg/kg of the patient's body weight. Preferably, the dosage administered to a patient is between 0.1 mg/kg and 20 mg/kg of the patient's body weight, more preferably 1 mg/kg to 10 mg/kg of the patient's body weight. Generally, human antibodies have a longer half-life within the human body than antibodies from other species due to the immune response to the foreign polypeptides. Thus, lower dosages of human antibodies and less frequent administration is often possible. Further, the dosage and frequency of administration of antibodies of the invention may be reduced by enhancing uptake and tissue penetration (e.g., into the brain) of the antibodies by modifications such as, for example, lipidation.

[0338] The invention also provides a pharmaceutical pack or kit comprising one or more containers filled with one or more of the ingredients of the pharmaceutical compositions of the invention. Optionally associated with such container(s) can be a notice in the form prescribed by a governmental agency regulating the manufacture, use or sale of pharmaceuticals or biological products, which notice reflects approval by the agency of manufacture, use or sale for human administration.

[0339] Diagnosis and Imaging

[0340] Labeled antibodies, and derivatives and analogs thereof, which specifically bind to a polypeptide of interest can be used for diagnostic purposes to detect, diagnose, or monitor diseases, disorders, and/or conditions associated with the aberrant expression and/or activity of a polypeptide of the invention. The invention provides for the detection of aberrant expression of a polypeptide of interest, comprising (a) assaying the expression of the polypeptide of interest in cells or body fluid of an individual using one or more antibodies specific to the polypeptide interest and (b) comparing the level of gene expression with a standard gene expression level, whereby an increase or decrease in the assayed polypeptide gene expression level compared to the standard expression level is indicative of aberrant expression.

[0341] The invention provides a diagnostic assay for diagnosing a disorder, comprising (a) assaying the expression of the polypeptide of interest in cells or body fluid of an individual using one or more antibodies specific to the polypeptide interest and (b) comparing the level of gene expression with a standard gene expression level, whereby an increase or decrease in the assayed polypeptide gene expression level compared to the standard expression level is indicative of a particular disorder. With respect to cancer, the presence of a relatively high amount of transcript in biopsied tissue from an individual may indicate a predisposition for the development of the disease, or may provide a means for detecting the disease prior to the appearance of actual clinical symptoms. A more definitive diagnosis of this type may allow health professionals to employ preventative measures or aggressive treatment earlier thereby preventing the development or further progression of the cancer.

[0342] Antibodies of the invention can be used to assay protein levels in a biological sample using classical immunohistological methods known to those of skill in the art (e.g., see Jalkanen et al., J. Cell. Biol. 101:976-985 (1985); Jalkanen et al., J. Cell . Biol. 105:3087-3096 (1987)). Other antibody-based methods useful for detecting protein gene expression include immunoassays, such as the enzyme linked immunosorbent assay (ELISA) and the radioimmunoassay (RIA). Suitable antibody assay labels are known in the art and include enzyme labels, such as, glucose oxidase; radioisotopes, such as iodine (125I, 121I), carbon (14C), sulfur (35S), tritium (3H), indium (112In), and technetium (99Tc); luminescent labels, such as luminol; and fluorescent labels, such as fluorescein and rhodamine, and biotin.

[0343] One facet of the invention is the detection and diagnosis of a disease or disorder associated with aberrant expression of a polypeptide of interest in an animal, preferably a mammal and most preferably a human. In one embodiment, diagnosis comprises: a) administering (for example, parenterally, subcutaneously, or intraperitoneally) to a subject an effective amount of a labeled molecule which specifically binds to the polypeptide of interest; b) waiting for a time interval following the administering for permitting the labeled molecule to preferentially concentrate at sites in the subject where the polypeptide is expressed (and for unbound labeled molecule to be cleared to background level); c) determining background level; and d) detecting the labeled molecule in the subject, such that detection of labeled molecule above the background level indicates that the subject has a particular disease or disorder associated with aberrant expression of the polypeptide of interest. Background level can be determined by various methods including, comparing the amount of labeled molecule detected to a standard value previously determined for a particular system.

[0344] It will be understood in the art that the size of the subject and the imaging system used will determine the quantity of imaging moiety needed to produce diagnostic images. In the case of a radioisotope moiety, for a human subject, the quantity of radioactivity injected will normally range from about 5 to 20 millicuries of 99mTc. The labeled antibody or antibody fragment will then preferentially accumulate at the location of cells which contain the specific protein. In vivo tumor imaging is described in S. W. Burchiel et al., “Immunopharmacokinetics of Radiolabeled Antibodies and Their Fragments.” (Chapter 13 in Tumor Imaging: The Radiochemical Detection of Cancer, S. W. Burchiel and B. A. Rhodes, eds., Masson Publishing Inc. (1982)).

[0345] Depending on several variables, including the type of label used and the mode of administration, the time interval following the administration for permitting the labeled molecule to preferentially concentrate at sites in the subject and for unbound labeled molecule to be cleared to background level is 6 to 48 hours or 6 to 24 hours or 6 to 12 hours. In another embodiment the time interval following administration is 5 to 20 days or 5 to 10 days.

[0346] In an embodiment, monitoring of the disease or disorder is carried out by repeating the method for diagnosing the disease or disease, for example, one month after initial diagnosis, six months after initial diagnosis, one year after initial diagnosis, etc.

[0347] Presence of the labeled molecule can be detected in the patient using methods known in the art for in vivo scanning. These methods depend upon the type of label used. Skilled artisans will be able to determine the appropriate method for detecting a particular label. Methods and devices that may be used in the diagnostic methods of the invention include, but are. not limited to, computed tomography (CT), whole body scan such as position emission tomography (PET), magnetic resonance imaging (MRI), and sonography.

[0348] In a specific embodiment, the molecule is labeled with a radioisotope and is detected in the patient using a radiation responsive surgical instrument (Thurston et al., U.S. Pat. No. 5,441,050). In another embodiment, the molecule is labeled with a fluorescent compound and is detected in the patient using a fluorescence responsive scanning instrument. In another embodiment, the molecule is labeled with a positron emitting metal and is detected in the patent using positron emission-tomography. In yet another embodiment, the molecule is labeled with a paramagnetic label and is detected in a patient using magnetic resonance imaging (MRI).

[0349] Kits

[0350] The present invention provides kits that can be used in the above methods. In one embodiment, a kit comprises an antibody of the invention, preferably a purified antibody, in one or more containers. In a specific embodiment, the kits of the present invention contain a substantially isolated polypeptide comprising an epitope which is specifically immunoreactive with an antibody included in the kit. Preferably, the kits of the present invention further comprise a control antibody which does not react with the polypeptide of interest. In another specific embodiment, the kits of the present invention contain a means for detecting the binding of an antibody to a polypeptide of interest (e.g., the antibody may be conjugated to a detectable substrate such as a fluorescent compound, an enzymatic substrate, a radioactive compound or a luminescent compound, or a second antibody which recognizes the first antibody may be conjugated to a detectable substrate).

[0351] In another specific embodiment of the present invention, the kit is a diagnostic kit for use in screening serum containing antibodies specific against proliferative and/or cancerous polynucleotides and polypeptides. Such a kit may include a control antibody that does not react with the polypeptide of interest. Such a kit may include a substantially isolated polypeptide antigen comprising an epitope which is specifically immunoreactive with at least one anti-polypeptide antigen antibody. Further, such a kit includes means for detecting the binding of said antibody to the antigen (e.g., the antibody may be conjugated to a fluorescent compound such as fluorescein or rhodamine which can be detected by flow cytometry). In specific embodiments, the kit may include a recombinantly produced or chemically synthesized polypeptide antigen. The polypeptide antigen of the kit may also be attached to a solid support.

[0352] In a more specific embodiment the detecting means of the above-described kit includes a solid support to which said polypeptide antigen is attached. Such a kit may also include a non-attached reporter-labeled anti-human antibody. In this embodiment, binding of the antibody to the polypeptide antigen can be detected by binding of the said reporter-labeled antibody.

[0353] In an additional embodiment, the invention includes a diagnostic kit for use in screening serum containing antigens of the polypeptide of the invention. The diagnostic kit includes a substantially isolated antibody specifically immunoreactive with polypeptide or polynucleotide antigens, and means for detecting the binding of the polynucleotide or polypeptide antigen to the antibody. In one embodiment, the antibody is attached to a solid support. In a specific embodiment, the antibody may be a monoclonal antibody. The detecting means of the kit may include a second, labeled monoclonal antibody. Alternatively, or in addition, the detecting means may include a labeled, competing antigen.

[0354] In one diagnostic configuration, test serum is reacted with a solid phase reagent having a surface-bound antigen obtained by the methods of the present invention. After binding with specific antigen antibody to the reagent and removing unbound serum components by washing, the reagent is reacted with reporter-labeled anti-human antibody to bind reporter to the reagent in proportion to the amount of bound anti-antigen antibody on the solid support. The reagent is again washed to remove unbound labeled antibody, and the amount of reporter associated with the reagent is determined. Typically, the reporter is an enzyme which is detected by incubating the solid phase in the presence of a suitable fluorometric, luminescent or colorimetric substrate (Sigma, St. Louis, Mo.).

[0355] The solid surface reagent in the above assay is prepared by known techniques for attaching protein material to solid support material, such as polymeric beads, dip sticks, 96-well plate or filter material. These attachment methods generally include non-specific adsorption of the protein to the support or covalent attachment of the protein, typically through a free amine group, to a chemically reactive group on the solid support, such as an activated carboxyl, hydroxyl, or aldehyde group. Alternatively, streptavidin coated plates can be used in conjunction with biotinylated antigen(s).

[0356] Thus, the invention provides an assay system or kit for carrying out this diagnostic method. The kit generally includes a support with surface- bound recombinant antigens, and a reporter-labeled anti-human antibody for detecting surface-bound anti-antigen antibody.

[0357] Uses of the Polynucleotides

[0358] Each of the polynucleotides identified herein can be used in numerous ways as reagents. The following description should be considered exemplary and utilizes known techniques.

[0359] The polynucleotides of the present invention are useful for chromosome identification. There exists an ongoing need to identify new chromosome markers, since few chromosome marking reagents, based on actual sequence data (repeat polymorphisms), are presently available. Each sequence is specifically targeted to and can hybridize with a particular location on an individual human chromosome, thus each polynucleotide of the present invention can routinely be used as a chromosome marker using techniques known in the art. Table 1A, column 9 provides the chromosome location of some of the polynucleotides of the invention.

[0360] Briefly, sequences can be mapped to chromosomes by preparing PCR primers (preferably at least 15 bp (e.g., 15-25 bp) from the sequences shown in SEQ ID NO:X. Primers can optionally be selected using computer analysis so that primers do not span more than one predicted exon in the genomic DNA. These primers are then used for PCR screening of somatic cell hybrids containing individual human chromosomes. Only those hybrids containing the human gene corresponding to SEQ ID NO:X will yield an amplified fragment.

[0361] Similarly, somatic hybrids provide a rapid method of PCR mapping the polynucleotides to particular chromosomes. Three or more clones can be assigned per day using a single thermal cycler. Moreover, sublocalization of the polynucleotides can be achieved with panels of specific chromosome fragments. Other gene mapping strategies that can be used include in situ hybridization, prescreening with labeled flow-sorted chromosomes, preselection by hybridization to construct chromosome specific-cDNA libraries, and computer mapping techniques (See, e.g., Shuler, Trends Biotechnol 16:456-459 (1998) which is hereby incorporated by reference in its entirety).

[0362] Precise chromosomal location of the polynucleotides can also be achieved using fluorescence in situ hybridization (FISH) of a metaphase chromosomal spread. This technique uses polynucleotides as short as 500 or 600 bases; however, polynucleotides 2,000-4,000 bp are preferred. For a review of this technique, see Verma et al., “Human Chromosomes: a Manual of Basic Techniques,” Pergamon Press, New York (1988).

[0363] For chromosome mapping, the polynucleotides can be used individually (to mark a single chromosome or a single site on that chromosome) or in panels (for marking multiple sites and/or multiple chromosomes).

[0364] Thus, the present invention also provides a method for chromosomal localization which involves (a) preparing PCR primers from the polynucleotide sequences in Table 1A and/or Table 2 and SEQ ID NO:X and (b) screening somatic cell hybrids containing individual chromosomes.

[0365] The polynucleotides of the present invention would likewise be useful for radiation hybrid mapping, HAPPY mapping, and long range restriction mapping. For a review of these techniques and others known in the art, see, e.g. Dear, “Genome Mapping: A Practical Approach,” IRL Press at Oxford University Press, London (1997); Aydin, J. Mol. Med. 77:691-694 (1999); Hacia et al., Mol. Psychiatry 3:483-492 (1998); Herrick et al., Chromosome Res. 7:409-423 (1999); Hamilton et al., Methods Cell Biol. 62:265-280 (2000); and/or Ott, J. Hered. 90:68-70 (1999) each of which is hereby incorporated by reference in its entirety.

[0366] Once a polynucleotide has been mapped to a precise chromosomal location, the physical position of the polynucleotide can be used in linkage analysis. Linkage analysis establishes coinheritance between a chromosomal location and presentation of a particular disease. (Disease mapping data are found, for example, in V. McKusick, Mendelian Inheritance in Man (available on line through Johns Hopkins University Welch Medical Library)). Column 10 of Table 1A provides an OMIM reference identification number of diseases associated with the cytologic band disclosed in column 9 of Table 1A, as determined using techniques described herein and by reference to Table 5. Assuming 1 megabase mapping resolution and one gene per 20 kb, a cDNA precisely localized to a chromosomal region associated with the disease could be one of 50-500 potential causative genes.

[0367] Thus, once coinheritance is established, differences in a polynucleotide of the invention and the corresponding gene between affected and unaffected individuals can be examined. First, visible structural alterations in the chromosomes, such as deletions or translocations, are examined in chromosome spreads or by PCR. If no structural alterations exist, the presence of point mutations are ascertained. Mutations observed in some or all affected individuals, but not in normal individuals, indicates that the mutation may cause the disease. However, complete sequencing of the polypeptide and the corresponding gene from several normal individuals is required to distinguish the mutation from a polymorphism. If a new polymorphism is identified, this polymorphic polypeptide can be used for further linkage analysis.

[0368] Furthermore, increased or decreased expression of the gene in affected individuals as compared to unaffected individuals can be assessed using the polynucleotides of the invention. Any of these alterations (altered expression, chromosomal rearrangement, or mutation) can be used as a diagnostic or prognostic marker. Diagnostic and prognostic methods, kits and reagents encompassed by the present invention are briefly described below and more thoroughly elsewhere herein (see e.g., the sections labeled “Antibodies”, “Diagnostic Assays”, and “Methods for Detecting Diseases”).

[0369] Thus, the invention also provides a diagnostic method useful during diagnosis of a disorder, involving measuring the expression level of polynucleotides of the present invention in cells or body fluid from an individual and comparing the measured gene expression level with a standard level of polynucleotide expression level, whereby an increase or decrease in the gene expression level compared to the standard is indicative of a disorder. Additional non-limiting examples of diagnostic methods encompassed by the present invention are more thoroughly described elsewhere herein (see, e.g., Example 12).

[0370] In still another embodiment, the invention includes a kit for analyzing samples for the presence of proliferative and/or cancerous polynucleotides derived from a test subject. In a general embodiment, the kit includes at least one polynucleotide probe containing a nucleotide sequence that will specifically hybridize with a polynucleotide of the invention and a suitable container. In a specific embodiment, the kit includes two polynucleotide probes defining an internal region of the polynucleotide of the invention, where each probe has one strand containing a 31′mer-end internal to the region. In a further embodiment, the probes may be useful as primers for polymerase chain reaction amplification.

[0371] Where a diagnosis of a related disorder, including, for example, diagnosis of a tumor, has already been made according to conventional methods, the present invention is useful as a prognostic indicator, whereby patients exhibiting enhanced or depressed polynucleotide of the invention expression will experience a worse clinical outcome relative to patients expressing the gene at a level nearer the standard level.

[0372] By “measuring the expression level of polynucleotides of the invention” is intended qualitatively or quantitatively measuring or estimating the level of the polypeptide of the invention or the level of the mRNA encoding the polypeptide of the invention in a first biological sample either directly (e.g., by determining or estimating absolute protein level or mRNA level) or relatively (e.g., by comparing to the polypeptide level or mRNA level in a second biological sample). Preferably, the polypeptide level or mRNA level in the first biological sample is measured or estimated and compared to a standard polypeptide level or mRNA level, the standard being taken from a second biological sample obtained from an individual not having the related disorder or being determined by averaging levels from a population of individuals not having a related disorder. As will be appreciated in the art, once a standard polypeptide level or mRNA level is known, it can be used repeatedly as a standard for comparison.

[0373] By “biological sample” is intended any biological sample obtained from an individual, body fluid, cell line, tissue culture, or other source which contains polypeptide of the present invention or the corresponding mRNA. As indicated, biological samples include body fluids (such as semen, lymph, vaginal pool, sera, plasma, urine, synovial fluid and spinal fluid) which contain the polypeptide of the present invention, and tissue sources found to express the polypeptide of the present invention. Methods for obtaining tissue biopsies and body fluids from mammals are well known in the art. Where the biological sample is to include mRNA, a tissue biopsy is the preferred source.

[0374] The method(s) provided above may preferably be applied in a diagnostic method and/or kits in which polynucleotides and/or polypeptides of the invention are attached to a solid support. In one exemplary method, the support may be a “gene chip” or a “biological chip” as described in U.S. Pat. Nos. 5,837,832, 5,874,219, and 5,856,174. Further, such a gene chip with polynucleotides of the invention attached may be used to identify polymorphisms between the isolated polynucleotide sequences of the invention, with polynucleotides isolated from a test subject. The knowledge of such polymorphisms (i.e. their location, as well as, their existence) would be beneficial in identifying disease loci for many disorders, such as for example, in neural disorders, immune system disorders, muscular disorders, reproductive disorders, gastrointestinal disorders, pulmonary disorders, digestive disorders, metabolic disorders, cardiovascular disorders, renal disorders, proliferative disorders, and/or cancerous diseases and conditions. Such a method is described in U.S. Pat. Nos. 5,858,659 and 5,856,104. The US Patents referenced supra are hereby incorporated by reference in their entirety herein.

[0375] The present invention encompasses polynucleotides of the present invention that are chemically synthesized, or reproduced as peptide nucleic acids (PNA), or according to other methods known in the art. The use of PNAs would serve as the preferred form if the polynucleotides of the invention are incorporated onto a solid support, or gene chip. For the purposes of the present invention, a peptide nucleic acid (PNA) is a polyamide type of DNA analog and the monomeric units for adenine, guanine, thymine and cytosine are available commercially (Perceptive Biosystems). Certain components of DNA, such as phosphorus, phosphorus oxides, or deoxyribose derivatives, are not present in PNAs. As disclosed by Nielsen et al., Science 254, 1497 (1991); and Egholm et al., Nature 365, 666 (1993), PNAs bind specifically and tightly to complementary DNA strands and are not degraded by nucleases. In fact, PNA binds more strongly to DNA than DNA itself does. This is probably because there is no electrostatic repulsion between the two strands, and also the polyamide backbone is more flexible. Because of this, PNA/DNA duplexes bind under a wider range of stringency conditions than DNA/DNA duplexes, making it easier to perform multiplex hybridization. Smaller probes can be used than with DNA due to the strong binding. In addition, it is more likely that single base mismatches can be determined with PNA/DNA hybridization because a single mismatch in a PNA/DNA 15-mer lowers the melting point (T.sub.m) by 8°-20° C., vs. 4°-16° C. for the DNA/DNA 15-mer duplex. Also, the absence of charge groups in PNA means that hybridization can be done at low ionic strengths and reduce possible interference by salt during the analysis.

[0376] The compounds of the present invention have uses which include, but are not limited to, detecting cancer in mammals. In particular the invention is useful during diagnosis of pathological cell proliferative neoplasias which include, but are not limited to: acute myelogenous leukemias including acute monocytic leukemia, acute myeloblastic leukemia, acute promyelocytic leukemia, acute myelomonocytic leukemia, acute erythroleukemia, acute megakaryocytic leukemia, and acute undifferentiated leukemia, etc.; and chronic myelogenous leukemias including chronic myelomonocytic leukemia, chronic granulocytic leukemia, etc. Preferred mammals include monkeys, apes, cats, dogs, cows, pigs, horses, rabbits and humans. Particularly preferred are humans.

[0377] Pathological cell proliferative disorders are often associated with inappropriate activation of proto-oncogenes. (Gelmann, E. P. et al., “The Etiology of Acute Leukemia: Molecular Genetics and Viral Oncology,” in Neoplastic Diseases of the Blood, Vol 1., Wiemik, P. H. et al. eds., 161-182 (1985)). Neoplasias are now believed to result from the qualitative alteration of a normal cellular gene product, or from the quantitative modification of gene expression by insertion into the chromosome of a viral sequence, by chromosomal translocation of a gene to a more actively transcribed region, or by some other mechanism. (Gelmann et al., supra) It is likely that mutated or altered expression of specific genes is involved in the pathogenesis of some leukemias, among other tissues and cell types. (Gelmann et al., supra) Indeed, the human counterparts of the oncogenes involved in some animal neoplasias have been amplified or translocated in some cases of human leukemia and carcinoma. (Gelmann et al., supra)

[0378] For example, c-myc expression is highly amplified in the non-lymphocytic leukemia cell line HL-60. When HL-60 cells are chemically induced to stop proliferation, the level of c-myc is found to be downregulated. (International Publication Number WO 91/15580). However, it has been shown that exposure of HL-60 cells to a DNA construct that is complementary to the 5′ end of c-myc or c-myb blocks translation of the corresponding mRNAs which downregulates expression of the c-myc or c-myb proteins and causes arrest of cell proliferation and differentiation of the treated cells. (International Publication Number WO 91/15580; Wickstrom et al., Proc. Natl. Acad. Sci. 85:1028 (1988); Anfossi et al., Proc. Natl. Acad. Sci. 86:3379 (1989)). However, the skilled artisan would appreciate the present invention's usefulness is not be limited to treatment, prevention, and/or prognosis of proliferative disorders of cells and tissues of hematopoietic origin, in light of the numerous cells and cell types of varying origins which are known to exhibit proliferative phenotypes.

[0379] In addition to the foregoing, a polynucleotide of the present invention can be used to control gene expression through triple helix formation or through antisense DNA or RNA. Antisense techniques are discussed, for example, in Okano, J. Neurochem. 56: 560 (1991); “Oligodeoxynucleotides as Antisense Inhibitors of Gene Expression, CRC Press, Boca Raton, Fla. (1988). Triple helix formation is discussed in, for instance Lee et al., Nucleic Acids Research 6: 3073 (1979); Cooney et al., Science 241: 456 (1988); and Dervan et al., Science 251: 1360 (1991). Both methods rely on binding of the polynucleotide to a complementary DNA or RNA. For these techniques, preferred polynucleotides are usually oligonucleotides 20 to 40 bases in length and complementary to either the region of the gene involved in transcription (triple helix - see Lee et al., Nucl. Acids Res. 6:3073 (1979); Cooney et al., Science 241:456 (1988); and Dervan et al., Science 251:1360 (1991)) or to the mRNA itself (antisense—Okano, J. Neurochem. 56:560 (1991); Oligodeoxy-nucleotides as Antisense Inhibitors of Gene Expression, CRC Press, Boca Raton, Fla. (1988)). Triple helix formation optimally results in a shut-off of RNA transcription from DNA, while antisense RNA hybridization blocks translation of an mRNA molecule into polypeptide. The oligonucleotide described above can also be delivered to cells such that the antisense RNA or DNA may be expressed in vivo to inhibit production of polypeptide of the present invention antigens. Both techniques are effective in model systems, and the information disclosed herein can be used to design antisense or triple helix polynucleotides in an effort to treat disease, and in particular, for the treatment of proliferative diseases and/or conditions. Non-limiting antisense and triple helix methods encompassed by the present invention are more thoroughly described elsewhere herein (see, e.g., the section labeled “Antisense and Ribozyme (Antagonists)”).

[0380] Polynucleotides of the present invention are also useful in gene therapy. One goal of gene therapy is to insert a normal gene into an organism having a defective gene, in an effort to correct the genetic defect. The polynucleotides disclosed in the present invention offer a means of targeting such genetic defects in a highly accurate manner. Another goal is to insert a new gene that was not present in the host genome, thereby producing a new trait in the host cell. Additional non-limiting examples of gene therapy methods encompassed by the present invention are more thoroughly described elsewhere herein (see, e.g., the sections labeled “Gene Therapy Methods”, and Examples 16, 17 and 18).

[0381] The polynucleotides are also useful for identifying individuals from minute biological samples. The United States military, for example, is considering the use of restriction fragment length polymorphism (RFLP) for identification of its personnel. In this technique, an individual's genomic DNA is digested with one or more restriction enzymes, and probed on a Southern blot to yield unique bands for identifying personnel. This method does not suffer from the current limitations of “Dog Tags” which can be lost, switched, or stolen, making positive identification difficult. The polynucleotides of the present invention can be used as additional DNA markers for RFLP.

[0382] The polynucleotides of the present invention can also be used as an alternative to RFLP, by determining the actual base-by-base DNA sequence of selected portions of an individual's genome. These sequences can be used to prepare PCR primers for amplifying and isolating such selected DNA, which can then be sequenced. Using this technique, individuals can be identified because each individual will have a unique set of DNA sequences. Once an unique ID database is established for an individual, positive identification of that individual, living or dead, can be made from extremely small tissue samples.

[0383] Forensic biology also benefits from using DNA-based identification techniques as disclosed herein. DNA sequences taken from very small biological samples such as tissues, e.g., hair or skin, or body fluids, e.g., blood, saliva, semen, synovial fluid, amniotic fluid, breast milk, lymph, pulmonary sputum or surfactant, urine, fecal matter, etc., can be amplified using PCR. In one prior art technique, gene sequences amplified from polymorphic loci, such as DQa class II HLA gene, are used in forensic biology to identify individuals. (Erlich, H., PCR Technology, Freeman and Co. (1992)). Once these specific polymorphic loci are amplified, they are digested with one or more restriction enzymes, yielding an identifying set of bands on a Southern blot probed with DNA corresponding to the DQa class II HLA gene. Similarly, polynucleotides of the present invention can be used as polymorphic markers for forensic purposes.

[0384] There is also a need for reagents capable of identifying the source of a particular tissue. Such need arises, for example, in forensics when presented with tissue of unknown origin. Appropriate reagents can comprise, for example, DNA probes or primers prepared from the sequences of the present invention, specific to tissues, including but not limited to those shown in Table 1A. Panels of such reagents can identify tissue by species and/or by organ type. In a similar fashion, these reagents can be used to screen tissue cultures for contamination. Additional non-limiting examples of such uses are further described herein.

[0385] The polynucleotides of the present invention are also useful as hybridization probes for differential identification of the tissue(s) or cell type(s) present in a biological sample. Similarly, polypeptides and antibodies directed to polypeptides of the present invention are useful to provide immunological probes for differential identification of the tissue(s) (e.g., immunohistochemistry assays) or cell type(s) (e.g., immunocytochemistry assays). In addition, for a number of disorders of the above tissues or cells, significantly higher or lower levels of gene expression of the polynucleotides/polypeptides of the present invention may be detected in certain tissues (e.g., tissues expressing polypeptides and/or polynucleotides of the present invention, for example, those disclosed in column 8 of Table 1A, and/or cancerous and/or wounded tissues) or bodily fluids (e.g., semen, lymph, vaginal pool, serum, plasma, urine, synovial fluid or spinal fluid) taken from an individual having such a disorder, relative to a “standard” gene expression level, i.e., the expression level in healthy tissue from an individual not having the disorder.

[0386] Thus, the invention provides a diagnostic method of a disorder, which involves: (a) assaying gene expression level in cells or body fluid of an individual; (b) comparing the gene expression level with a standard gene expression level, whereby an increase or decrease in the assayed gene expression level compared to the standard expression level is indicative of a disorder.

[0387] In the very least, the polynucleotides of the present invention can be used as molecular weight markers on Southern gels, as diagnostic probes for the presence of a specific mRNA in a particular cell type, as a probe to “subtract-out” known sequences in the process of discovering novel polynucleotides, for selecting and making oligomers for attachment to a “gene chip” or other support, to raise anti-DNA antibodies using DNA immunization techniques, and as an antigen to elicit an immune response.

[0388] Uses of the Polypeptides

[0389] Each of the polypeptides identified herein can be used in numerous ways. The following description should be considered exemplary and utilizes known techniques.

[0390] Polypeptides and antibodies directed to polypeptides of the present invention are useful to provide immunological probes for differential identification of the tissue(s) (e.g., immunohistochemistry assays such as, for example, ABC immunoperoxidase (Hsu et al., J. Histochem. Cytochem. 29:577-580 (1981)) or cell type(s) (e.g., immunocytochemistry assays).

[0391] Antibodies can be used to assay levels of polypeptides encoded by polynucleotides of the invention in a biological sample using classical immunohistological methods known to those of skill in the art (e.g., see Jalkanen, et al., J. Cell. Biol. 101:976-985 (1985); Jalkanen, et al., J. Cell. Biol. 105:3087-3096 (1987)). Other antibody-based methods useful for detecting protein gene expression include immunoassays, such as the enzyme linked immunosorbent assay (ELISA) and the radioimmunoassay (IA). Suitable antibody assay labels are known in the art and include enzyme labels, such as, glucose oxidase; radioisotopes, such as iodine (¹³¹I, ¹²⁵I, ¹²³I, ¹²¹I), carbon (¹⁴C), sulfur (³⁵S), tritium (³H), indium (^{115m}In, ^{113m}In, ¹¹²In, ¹¹¹In), and technetium (⁹⁹Tc, ^{99m}Tc), thallium (²⁰¹Ti), gallium (⁶⁸Ga, ⁶⁷Ga), palladium (¹⁰³Pd), molybdenum (99Mo), xenon (¹³³Xe), fluorine (¹⁸F), ¹⁵³Sm, ¹⁷⁷Lu, ¹⁵⁹Gd, ¹⁴⁹Pm, ¹⁴⁰La, ¹⁷⁵Yb, ¹⁶⁶Ho, ⁹⁰Y, ⁴⁷Sc, ¹⁸⁶ Re, ¹⁸⁸Re, ¹⁴²Pr, ¹⁰⁵Rh, ⁹⁷Ru; luminescent labels, such as luminol; and fluorescent labels, such as fluorescein and rhodamine, and biotin.

[0392] In addition to assaying levels of polypeptide of the present invention in a biological sample, proteins can also be detected in vivo by imaging. Antibody labels or markers for in vivo imaging of protein include those detectable by X-radiography, NMR or ESR. For X-radiography, suitable labels include radioisotopes such as barium or cesium, which emit detectable radiation but are not overtly harmful to the subject. Suitable markers for NMR and ESR include those with a detectable characteristic spin, such as deuterium, which may be incorporated into the antibody by labeling of nutrients for the relevant hybridoma.

[0393] A protein-specific antibody or antibody fragment which has been labeled with an appropriate detectable imaging moiety, such as a radioisotope (for example, ¹³¹I, ¹¹²In, ^{99m}Tc, (¹³¹I, ¹²⁵I, ¹²³I, ¹²¹I), carbon (¹⁴C), sulfur (³⁵S), tritium (³H), indium (^{115m}In, ^{113m}In, ¹¹²In, ¹¹¹In), and technetium (⁹⁹Tc, ^{99m}Tc), thallium (²⁰¹Ti), gallium (⁶⁸Ga, ⁶⁷Ga), palladium (¹⁰³Pd), molybdenum (⁹⁹Mo), xenon (¹³³Xe), fluorine (¹⁸F, ¹⁵³Sm, ¹⁷⁷Lu, ¹⁵⁹Gd, ¹⁴⁹Pm, ¹⁴⁰La, 175Yb, ¹⁶⁶Ho, ⁹⁰Y, ⁴⁷Sc, ¹⁸⁶Re, 188Re, ¹⁴²Pr, ¹⁰⁵Rh, ⁹⁷Ru), a radio-opaque substance, or a material detectable by nuclear magnetic resonance, is introduced (for example, parenterally, subcutaneously or intraperitoneally) into the mammal to be examined for immune system disorder. It will be understood in the art that the size of the subject and the imaging system used will determine the quantity of imaging moiety needed to produce diagnostic images. In the case of a radioisotope moiety, for a human subject, the quantity of radioactivity injected will normally range from about 5 to 20 millicuries of ^{99m}Tc. The labeled antibody or antibody fragment will then preferentially accumulate at the location of cells which express the polypeptide encoded by a polynucleotide of the invention. In vivo tumor imaging is described in S. W. Burchiel et al., “Immunopharmacokinetics of Radiolabeled Antibodies and Their Fragments” (Chapter 13 in Tumor Imaging: The Radiochemical Detection of Cancer, S. W. Burchiel and B. A. Rhodes, eds., Masson Publishing Inc. (1982)).

[0394] In one embodiment, the invention provides a method for the specific delivery of compositions of the invention to cells by administering polypeptides of the invention (e.g., polypeptides encoded by polynucleotides of the invention and/or antibodies) that are associated with heterologous polypeptides or nucleic acids. In one example, the invention provides a method for delivering a therapeutic protein into the targeted cell. In another example, the invention provides a method for delivering a single stranded nucleic acid (e.g., antisense or ribozymes) or double stranded nucleic acid (e.g., DNA that can integrate into the cell's genome or replicate episomally and that can be transcribed) into the targeted cell.

[0395] In another embodiment, the invention provides a method for the specific destruction of cells (e.g., the destruction of tumor cells) by administering polypeptides of the invention in association with toxins or cytotoxic prodrugs.

[0396] By “toxin” is meant one or more compounds that bind and activate endogenous cytotoxic effector systems, radioisotopes, holotoxins, modified toxins, catalytic subunits of toxins, or any molecules or enzymes not normally present in or on the surface of a cell that under defined conditions cause the cell's death. Toxins that may be used according to the methods of the invention include, but are not limited to, radioisotopes known in the art, compounds such as, for example, antibodies (or complement fixing containing portions thereof) that bind an inherent or induced endogenous cytotoxic effector system, thymidine kinase, endonuclease, RNAse, alpha toxin, ricin, abrin, Pseudomonas exotoxin A, diphtheria toxin, saporin, momordin, gelonin, pokeweed antiviral protein, alpha-sarcin and cholera toxin. “Toxin” also includes a cytostatic or cytocidal agent, a therapeutic agent or a radioactive metal ion, e.g., alpha-emitters such as, for example, ²¹³Bi, or other radioisotopes such as, for example, ¹⁰³Pd, ¹³³Xe, ¹³¹I, ⁶⁸Ge, ⁵⁷Co, ⁶⁵Zn, ⁸⁵Sr, ³²P, ³⁵S, ⁹⁰Y, ¹⁵³Sm, ¹⁵³Gd, ¹⁶⁹Yb, ⁵¹Cr, ⁵⁴Mn, ⁷⁵Se, ¹¹³Sn, ⁹⁰Yttrium, ¹¹⁷Tin, ¹⁸⁶Rhenium, ¹⁶⁶Holmium, and ¹⁸⁸Rhenium; luminescent labels, such as luminol; and fluorescent labels, such as fluorescein and rhodamine, and biotin. In a specific embodiment, the invention provides a method for the specific destruction of cells (e.g., the destruction of tumor cells) by administering polypeptides of the invention or antibodies of the invention in association with the radioisotope ⁹⁰Y. In another specific embodiment, the invention provides a method for the specific destruction of cells (e.g., the destruction of tumor cells) by administering polypeptides of the invention or antibodies of the invention in association with the radioisotope ¹¹¹In. In a further specific embodiment, the invention provides a method for the specific destruction of cells (e.g., the destruction of tumor cells) by administering polypeptides of the invention or antibodies of the invention in association with the radioisotope ¹³¹I.

[0397] Techniques known in the art may be applied to label polypeptides of the invention (including antibodies). Such techniques include, but are not limited to, the use of bifunctional conjugating agents (see e.g., U.S. Pat. Nos. 5,756,065; 5,714,631; 5,696,239; 5,652,361; 5,505,931; 5,489,425; 5,435,990; 5,428,139; 5,342,604; 5,274,119; 4,994,560; and 5,808,003; the contents of each of which are hereby incorporated by reference in its entirety).

[0398] Thus, the invention provides a diagnostic method of a disorder, which involves (a) assaying the expression level of a polypeptide of the present invention in cells or body fluid of an individual; and (b) comparing the assayed polypeptide expression level with a standard polypeptide expression level, whereby an increase or decrease in the assayed polypeptide expression level compared to the standard expression level is indicative of a disorder. With respect to cancer, the presence of a relatively high amount of transcript in biopsied tissue from an individual may indicate a predisposition for the development of the disease, or may provide a means for detecting the disease prior to the appearance of actual clinical symptoms. A more definitive diagnosis of this type may allow health professionals to employ preventative measures or aggressive treatment earlier thereby preventing the development or further progression of the cancer.

[0399] Moreover, polypeptides of the present invention can be used to treat or prevent diseases or conditions such as, for example, neural disorders, immune system disorders, muscular disorders, reproductive disorders, gastrointestinal disorders, pulmonary disorders, cardiovascular disorders, renal disorders, proliferative disorders, and/or cancerous diseases and conditions. For example, patients can be administered a polypeptide of the present invention in an effort to replace absent or decreased levels of the polypeptide (e.g., insulin), to supplement absent or decreased levels of a different polypeptide (e.g., hemoglobin S for hemoglobin B, SOD, catalase, DNA repair proteins), to inhibit the activity of a polypeptide (e.g., an oncogene or tumor supressor), to activate the activity of a polypeptide (e.g., by binding to a receptor), to reduce the activity of a membrane bound receptor by competing with it for free ligand (e.g., soluble TNF receptors used in reducing inflammation), or to bring about a desired response (e.g., blood vessel growth inhibition, enhancement of the immune response to proliferative cells or tissues).

[0400] Similarly, antibodies directed to a polypeptide of the present invention can also be used to treat disease (as described supra, and elsewhere herein). For example, administration of an antibody directed to a polypeptide of the present invention can bind, and/or neutralize the polypeptide, and/or reduce overproduction of the polypeptide. Similarly, administration of an antibody can activate the polypeptide, such as by binding to a polypeptide bound to a membrane (receptor).

[0401] At the very least, the polypeptides of the present invention can be used as molecular weight markers on SDS-PAGE gels or on molecular sieve gel filtration columns using methods well known to those of skill in the art. Polypeptides can also be used to raise antibodies, which in turn are used to measure protein expression from a recombinant cell, as a way of assessing transformation of the host cell. Moreover, the polypeptides of the present invention can be used to test the biological activities described herein. Diagnostic Assays

[0402] The compounds of the present invention are useful for diagnosis, treatment, prevention and/or prognosis of various disorders in mammals, preferably humans. Such disorders include, but are not limited to, those described herein under the section heading

[0403] “Biological Activities”.

[0404] For a number of disorders, substantially altered (increased or decreased) levels of gene expression can be detected in tissues, cells or bodily fluids (e.g., sera, plasma, urine, semen, synovial fluid or spinal fluid) taken from an individual having such a disorder, relative to a “standard” gene expression level, that is, the expression level in tissues or bodily fluids from an individual not having the disorder. Thus, the invention provides a diagnostic method useful during diagnosis of a disorder, which involves measuring the expression level of the gene encoding the polypeptide in tissues, cells or body fluid from an individual and comparing the measured gene expression level with a standard gene expression level, whereby an increase or decrease in the gene expression level(s) compared to the standard is indicative of a disorder. These diagnostic assays may be performed in vivo or in vitro, such as, for example, on blood samples, biopsy tissue or autopsy tissue.

[0405] The present invention is also useful as a prognostic indicator, whereby patients exhibiting enhanced or depressed gene expression will experience a worse clinical outcome relative to patients expressing the gene at a level nearer the standard level.

[0406] In certain embodiments, a polypeptide of the invention, or polynucleotides, antibodies, agonists, or antagonists corresponding to that polypeptide, may be used to diagnose and/or prognose diseases and/or disorders associated with the tissue(s) in which the polypeptide of the invention is expressed, including one, two, three, four, five, or more tissues disclosed in Table 1A, column 8 (Tissue Distribution Library Code).

[0407] By “assaying the expression level of the gene encoding the polypeptide” is intended qualitatively or quantitatively measuring or estimating the level of the polypeptide of the invention or the level of the mRNA encoding the polypeptide of the invention in a first biological sample either directly (e.g., by determining or estimating absolute protein level or mRNA level) or relatively (e.g., by comparing to the polypeptide level or mRNA level in a second biological sample). Preferably, the polypeptide expression level or mRNA level in the first biological sample is measured or estimated and compared to a standard polypeptide level or mRNA level, the standard being taken from a second biological sample obtained from an individual not having the disorder or being determined by averaging levels from a population of individuals not having the disorder. As will be appreciated in the art, once a standard polypeptide level or mRNA level is known, it can be used repeatedly as a standard for comparison.

[0408] By “biological sample” is intended any biological sample obtained from an individual, cell line, tissue culture, or other source containing polypeptides of the invention (including portions thereof) or mRNA. As indicated, biological samples include body fluids (such as sera, plasma, urine, synovial fluid and spinal fluid) and tissue sources found to express the full length or fragments thereof of a polypeptide or mRNA. Methods for obtaining tissue biopsies and body fluids from mammals are well known in the art. Where the biological sample is to include mRNA, a tissue biopsy is the preferred source.

[0409] Total cellular RNA can be isolated from a biological sample using any suitable technique such as the single-step guanidinium-thiocyanate-phenol-chloroform method described in Chomczynski and Sacchi, Anal. Biochem. 162:156-159 (1987). Levels of mRNA encoding the polypeptides of the invention are then assayed using any appropriate method. These include Northern blot analysis, S1 nuclease mapping, the polymerase chain reaction (PCR), reverse transcription in combination with the polymerase chain reaction (RT-PCR), and reverse transcription in combination with the ligase chain reaction (RT-LCR).

[0410] The present invention also relates to diagnostic assays such as quantitative and diagnostic assays for detecting levels of polypeptides of the invention, in a biological sample (e.g., cells and tissues), including determination of normal and abnormal levels of polypeptides. Thus, for instance, a diagnostic assay in accordance with the invention for detecting over-expression of polypeptides of the invention compared to normal control tissue samples may be used to detect the presence of tumors. Assay techniques that can be used to determine levels of a polypeptide, such as a polypeptide of the present invention in a sample derived from a host are well-known to those of skill in the art. Such assay methods include radioimmunoassays, competitive-binding assays, Western Blot analysis and ELISA assays. Assaying polypeptide levels in a biological sample can occur using any art-known method.

[0411] Assaying polypeptide levels in a biological sample can occur using antibody-based techniques. For example, polypeptide expression in tissues can be studied with classical immunohistological methods (Jalkanen et al., J. Cell. Biol. 101:976-985 (1985); Jalkanen, M., et al., J. Cell . Biol. 105:3087-3096 (1987)). Other antibody-based methods useful for detecting polypeptide gene expression include immunoassays, such as the enzyme linked immunosorbent assay (ELISA) and the radioimmunoassay (RIA). Suitable antibody assay labels are known in the art and include enzyme labels, such as, glucose oxidase, and radioisotopes, such as iodine (¹²⁵I, ¹²¹I), carbon (¹⁴C), sulfur (³⁵S), tritium (³H), indium (¹¹²In), and technetium (^{99m}Tc), and fluorescent labels, such as fluorescein and rhodamine, and biotin.

[0412] The tissue or cell type to be analyzed will generally include those which are known, or suspected, to express the gene of inteest (such as, for example, cancer). The protein isolation methods employed herein may, for example, be such as those described in Harlow and Lane (Harlow, E. and Lane, D., 1988, “Antibodies: A Laboratory Manual”, Cold Spring Harbor Laboratory Press, Cold Spring Harbor, N.Y.), which is incorporated herein by reference in its entirety. The isolated cells can be derived from cell culture or from a patient. The analysis of cells taken from culture may be a necessary step in the assessment of cells that could be used as part of a cell-based gene therapy technique or, alternatively, to test the effect of compounds on the expression of the gene.

[0413] For example, antibodies, or fragments of antibodies, such as those described herein, may be used to quantitatively or qualitatively detect the presence of gene products or conserved variants or peptide fragments thereof. This can be accomplished, for example, by immunofluorescence techniques employing a fluorescently labeled antibody coupled with light microscopic, flow cytometric, or fluorimetric detection.

[0414] In a preferred embodiment, antibodies, or fragments of antibodies directed to any one or all of the predicted epitope domains of the polypeptides of the invention (shown in column 7 of Table 1A) may be used to quantitatively or qualitatively detect the presence of gene products or conserved variants or peptide fragments thereof. This can be accomplished, for example, by immunofluorescence techniques employing a fluorescently labeled antibody coupled with light microscopic, flow cytometric, or fluorimetric detection.

[0415] In an additional preferred embodiment, antibodies, or fragments of antibodies directed to a conformational epitope of a polypeptide of the invention may be used to quantitatively or qualitatively detect the presence of gene products or conserved variants or peptide fragments thereof. This can be accomplished, for example, by immunofluorescence techniques employing a fluorescently labeled antibody coupled with light microscopic, flow cytometric, or fluorimetric detection.

[0416] The antibodies (or fragments thereof), and/or polypeptides of the present invention may, additionally, be employed histologically, as in immunofluorescence, immunoelectron microscopy or non-immunological assays, for in situ detection of gene products or conserved variants or peptide fragments thereof. In situ detection may be accomplished by removing a histological specimen from a patient, and applying thereto a labeled antibody or polypeptide of the present invention. The antibody (or fragment thereof) or polypeptide is preferably applied by overlaying the labeled antibody (or fragment) onto a biological sample. Through the use of such a procedure, it is possible to determine not only the presence of the gene product, or conserved variants or peptide fragments, or polypeptide binding, but also its distribution in the examined tissue. Using the present invention, those of ordinary skill will readily perceive that any of a wide variety of histological methods (such as staining procedures) can be modified in order to achieve such in situ detection.

[0417] Immunoassays and non-immunoassays for gene products or conserved variants or peptide ragments thereof will typically comprise incubating a sample, such as a biological fluid, a tissue extract, freshly harvested cells, or lysates of cells which have been incubated in cell culture, in the presence of a detectably labeled antibody capable of binding gene products or conserved variants or peptide fragments thereof, and detecting the bound antibody by any of a number of techniques well-known in the art.

[0418] The biological sample may be brought in contact with and immobilized onto a solid phase support or carrier such as nitrocellulose, or other solid support which is capable of immobilizing cells, cell particles or soluble proteins. The support may then be washed with suitable buffers followed by treatment with the detectably labeled antibody or detectable polypeptide of the invention. The solid phase support may then be washed with the buffer a second time to remove unbound antibody or polypeptide. Optionally the antibody is subsequently labeled. The amount of bound label on solid support may then be detected by conventional means.

[0419] By “solid phase support or carrier” is intended any support capable of binding an antigen or an antibody. Well-known supports or carriers include glass, polystyrene, polypropylene, polyethylene, dextran, nylon, amylases, natural and modified celluloses, polyacrylamides, gabbros, and magnetite. The nature of the carrier can be either soluble to some extent or insoluble for the purposes of the present invention. The support material may have virtually any possible structural configuration so long as the coupled molecule is capable of binding to an antigen or antibody. Thus, the support configuration may be spherical, as in a bead, or cylindrical, as in the inside surface of a test tube, or the external surface of a rod. Alternatively, the surface may be flat such as a sheet, test strip, etc. Preferred supports include polystyrene beads. Those skilled in the art will know many other suitable carriers for binding antibody or antigen, or will be able to ascertain the same by use of routine experimentation.

[0420] The binding activity of a given lot of antibody or antigen polypeptide may be determined according to well known methods. Those skilled in the art will be able to determine operative and optimal assay conditions for each determination by employing routine experimentation.

[0421] In addition to assaying polypeptide levels or polynucleotide levels in a biological sample obtained from an individual, polypeptide or polynucleotide can also be detected in vivo by imaging. For example, in one embodiment of the invention, polypeptides and/or antibodies of the invention are used to image diseased cells, such as neoplasms. In another embodiment, polynucleotides of the invention (e.g., polynucleotides complementary to all or a portion of an mRNA) and/or antibodies (e.g., antibodies directed to any one or a combination of the epitopes of a polypeptide of the invention, antibodies directed to a conformational epitope of a polypeptide of the invention, or antibodies directed to the full length polypeptide expressed on the cell surface of a mammalian cell) are used to image diseased or neoplastic cells.

[0422] Antibody labels or markers for in vivo imaging of polypeptides of the invention include those detectable by X-radiography, NMR, MRI, CAT-scans or ESR. For X-radiography, suitable labels include radioisotopes such as barium or cesium, which emit detectable radiation but are not overtly harmful to the subject. Suitable markers for NMR and ESR include those with a detectable characteristic spin, such as deuterium, which may be incorporated into the antibody by labeling of nutrients for the relevant hybridoma. Where in vivo imaging is used to detect enhanced levels of polypeptides for diagnosis in humans, it may be preferable to use human antibodies or “humanized” chimeric monoclonal antibodies. Such antibodies can be produced using techniques described herein or otherwise known in the art. For example methods for producing chimeric antibodies are known in the art. See, for review, Morrison, Science 229:1202 (1985); Oi et al., BioTechniques 4:214 (1986); Cabilly et al., U.S. Pat. No. 4,816,567; Taniguchi et al., EP 171496; Morrison et al., EP 173494; Neuberger et al., WO 8601533; Robinson et al., WO 8702671; Boulianne et al., Nature 312:643 (1984); Neuberger et al., Nature 314:268 (1985).

[0423] Additionally, any polypeptides of the invention whose presence can be detected, can be administered. For example, polypeptides of the invention labeled with a radio-opaque or other appropriate compound can be administered and visualized in vivo, as discussed, above for labeled antibodies. Further, such polypeptides can be utilized for in vitro diagnostic procedures.

[0424] A polypeptide-specific antibody or antibody fragment which has been labeled with an appropriate detectable imaging moiety, such as a radioisotope (for example, ¹³¹I, ¹¹²In, ^{99m}Tc), a radio-opaque substance, or a material detectable by nuclear magnetic resonance, is introduced (for example, parenterally, subcutaneously or intraperitoneally) into the mammal to be examined for a disorder. It will be understood in the art that the size of the subject and the imaging system used will determine the quantity of imaging moiety needed to produce diagnostic images. In the case of a radioisotope moiety, for a human subject, the quantity of radioactivity injected will normally range from about 5 to 20 millicuries of ^{99m}Tc. The labeled antibody or antibody fragment will then preferentially accumulate at the location of cells which contain the antigenic protein. In vivo tumor imaging is described in S. W. Burchiel et al., “Immunopharmacokinetics of Radiolabeled Antibodies and Their Fragments” (Chapter 13 in Tumor Imaging: The Radiochemical Detection of Cancer, S. W. Burchiel and B. A. Rhodes, eds., Masson Publishing Inc. (1982)).

[0425] With respect to antibodies, one of the ways in which an antibody of the present invention can be detectably labeled is by linking the same to a reporter enzyme and using the linked product in an enzyme immunoassay (EIA) (Voller, A., “The Enzyme Linked Immunosorbent Assay (ELISA)”, 1978, Diagnostic Horizons 2:1-7, Microbiological Associates Quarterly Publication, Walkersville, Md.); Voller et al., J Clin. Pathol. 31:507-520 (1978); Butler, J. E., Meth. Enzymol. 73:482-523 (1981); Maggio, E. (ed.), 1980, Enzyme Immunoassay, CRC Press, Boca Raton, Fla.,; Ishikawa, E. et al., (eds.), 1981, Enzyme Immunoassay, Kgaku Shoin, Tokyo). The reporter enzyme which is bound to the antibody will react with an appropriate substrate, preferably a chromogenic substrate, in such a manner as to produce a chemical moiety which can be detected, for example, by spectrophotometric, fluorimetric or by visual means. Reporter enzymes which can be used to detectably label the antibody include, but are not limited to, malate dehydrogenase, staphylococcal nuclease, delta-5-steroid isomerase, yeast alcohol dehydrogenase, alpha-glycerophosphate, dehydrogenase, triose phosphate isomerase, horseradish peroxidase, alkaline phosphatase, asparaginase, glucose oxidase, beta-galactosidase, ribonuclease, urease, catalase, glucose-6-phosphate dehydrogenase, glucoamylase and acetylcholinesterase. Additionally, the detection can be accomplished by calorimetric methods which employ a chromogenic substrate for the reporter enzyme. Detection may also be accomplished by visual comparison of the extent of enzymatic reaction of a substrate in comparison with similarly prepared standards.

[0426] Detection may also be accomplished using any of a variety of other immunoassays. For example, by radioactively labeling the antibodies or antibody fragments, it is possible to detect polypeptides through the use of a radioimmunoassay (RIA) (see, for example, Weintraub, B., Principles of Radioimmunoassays, Seventh Training Course on Radioligand Assay Techniques, The Endocrine Society, March, 1986, which is incorporated by reference herein). The radioactive isotope can be detected by means including, but not limited to, a gamma counter, a scintillation counter, or autoradiography.

[0427] It is also possible to label the antibody with a fluorescent compound. When the fluorescently labeled antibody is exposed to light of the proper wave length, its presence can then be detected due to fluorescence. Among the most commonly used fluorescent labeling compounds are fluorescein isothiocyanate, rhodamine, phycoerythrin, phycocyanin, allophycocyanin, ophthaldehyde and fluorescamine.

[0428] The antibody can also be detectably labeled using fluorescence emitting metals such as ¹⁵²Eu, or others of the lanthanide series. These metals can be attached to the antibody using such metal chelating groups as diethylenetriaminepentacetic acid (DTPA) or ethylenediaminetetraacetic acid (EDTA).

[0429] The antibody also can be detectably labeled by coupling it to a chemiluminescent compound. The presence of the chemiluminescent-tagged antibody is then determined by detecting the presence of luminescence that arises during the course of a chemical reaction. Examples of particularly useful chemiluminescent labeling compounds are luminol, isoluminol, theromatic acridinium ester, imidazole, acridinium salt and oxalate ester.

[0430] Likewise, a bioluminescent compound may be used to label the antibody of the present invention. Bioluminescence is a type of chemiluminescence found in biological systems in, which a catalytic protein increases the efficiency of the chemiluminescent reaction. The presence of a bioluminescent protein is determined by detecting the presence of luminescence. Important bioluminescent compounds for purposes of labeling are luciferin, luciferase and aequorin.

[0431] Methods for Detecting Diseases

[0432] In general, a disease may be detected in a patient based on the presence of one or more proteins of the invention and/or polynucleotides encoding such proteins in a biological sample (for example, blood, sera, urine, and/or tumor biopsies) obtained from the patient. In other words, such proteins may be used as markers to indicate the presence or absence of a disease or disorder, including cancer and/or as described elsewhere herein. In addition, such proteins may be useful for the detection of other diseases and cancers. The binding agents provided herein generally permit detection of the level of antigen that binds to the agent in the biological sample. Polynucleotide primers and probes may be used to detect the level of mRNA encoding polypeptides of the invention, which is also indicative of the presence or absence of a disease or disorder, including cancer. In general, polypeptides of the invention should be present at a level that is at least three fold higher in diseased tissue than in normal tissue.

[0433] There are a variety of assay formats known to those of ordinary skill in the art for using a binding agent to detect polypeptide markers in a sample. See, e.g., Harlow and Lane, supra. In general, the presence or absence of a disease in a patient may be determined by (a) contacting a biological sample obtained from a patient with a binding agent; (b) detecting in the sample a level of polypeptide that binds to the binding agent; and (c) comparing the level of polypeptide with a predetermined cut-off value.

[0434] In a preferred embodiment, the assay involves the use of a binding agent(s) immobilized on a solid support to bind to and remove the polypeptide of the invention from the remainder of the sample. The bound polypeptide may then be detected using a detection reagent that contains a reporter group and specifically binds to the binding agent/polypeptide complex. Such detection reagents may comprise, for example, a binding agent that specifically binds to the polypeptide or an antibody or other agent that specifically binds to the binding agent, such as an anti-immunoglobulin, protein G, protein A or a lectin. Alternatively, a competitive assay may be utilized, in which a polypeptide is labeled with a reporter group and allowed to bind to the immobilized binding agent after incubation of the binding agent with the sample. The extent to which components of the sample inhibit the binding of the labeled polypeptide to the binding agent is indicative of the reactivity of the sample with the immobilized binding agent. Suitable polypeptides for use within such assays include polypeptides of the invention and portions thereof, or antibodies, to which the binding agent binds, as described above.

[0435] The solid support may be any material known to those of skill in the art to which polypeptides of the invention may be attached. For example, the solid support may be a test well in a microtiter plate or a nitrocellulose or other suitable membrane. Alternatively, the support may be a bead or disc, such as glass fiberglass, latex or a plastic material such as polystyrene or polyvinylchloride. The support may also be a magnetic particle or a fiber optic sensor, such as those disclosed, for example, in U.S. Pat. No. 5,359,681. The binding agent may be immobilized on the solid support using a variety of techniques known to those of skill in the art, which are amply described in the patent and scientific literature. In the context of the present invention, the term “immobilization” refers to both noncovalent association, such as adsorption, and covalent attachment (which may be a direct linkage between the agent and functional groups on the support or may be a linkage by way of a cross-linking agent). Immobilization by adsorption to a well in a microtiter plate or to a membrane is preferred. In such cases, adsorption may be achieved by contacting the binding agent, in a suitable buffer, with the solid support for the suitable amount of time. The contact time varies with temperature, but is typically between about 1 hour and about 1 day. In general, contacting a well of plastic microtiter plate (such as polystyrene or polyvinylchloride) with an amount of binding agent ranging from about 10 ng to about 10 ug, and preferably about 100 ng to about 1 ug, is sufficient to immobilize an adequate amount of binding agent.

[0436] Covalent attachment of binding agent to a solid support may generally be achieved by first reacting the support with a bifunctional reagent that will react with both the support and a functional group, such as a hydroxyl or amino group, on the binding agent. For example, the binding agent may be covalently attached to supports having an appropriate polymer coating using benzoquinone or by condensation of an aldehyde group on the support with an amine and an active hydrogen on the binding partner (see, e.g., Pierce Immunotechnology Catalog and Handbook, 1991, at A12-A13).

[0437] Gene Therapy Methods

[0438] Also encompassed by the invention are gene therapy methods for treating or preventing disorders, diseases and conditions. The gene therapy methods relate to the introduction of nucleic acid (DNA, RNA and antisense DNA or RNA) sequences into an animal to achieve expression of the polypeptide of the present invention. This method requires a polynucleotide which codes for a polypeptide of the present invention operatively linked to a promoter and any other genetic elements necessary for the expression of the polypeptide by the target tissue. Such gene therapy and delivery techniques are known in the art, see, for example, WO90/11092, which is herein incorporated by reference.

[0439] Thus, for example, cells from a patient may be engineered with a polynucleotide (DNA or RNA) comprising a promoter operably linked to a polynucleotide of the present invention ex vivo, with the engineered cells then being provided to a patient to be treated with the polypeptide of the present invention. Such methods are well-known in the art. For example, see Belldegrun, A., et al., J. Natl. Cancer Inst. 85: 207-216 (1993); Ferrantini, M. et al., Cancer Research 53: 1107-1112 (1993); Ferrantini, M. et al., J. Immunology 153: 4604-4615 (1994); Kaido, T., et al., Int. J. Cancer 60: 221-229 (1995); Ogura, H., et al., Cancer Research 50: 5102-5106 (1990); Santodonato, L., et al., Human Gene Therapy 7:1-10 (1996); Santodonato, L., et al., Gene Therapy 4:1246-1255 (1997); and Zhang, J. -F. et al., Cancer Gene Therapy 3: 31-38 (1996)), which are herein incorporated by reference. In one embodiment, the cells which are engineered are arterial cells. The arterial cells may be reintroduced into the patient through direct injection to the artery, the tissues surrounding the artery, or through catheter injection.

[0440] As discussed in more detail below, the polynucleotide constructs can be delivered by any method that delivers injectable materials to the cells of an animal, such as, injection into the interstitial space of tissues (heart, muscle, skin, lung, liver, and the like). The polynucleotide constructs may be delivered in a pharmaceutically acceptable liquid or aqueous carrier.

[0441] In one embodiment, the polynucleotide of the present invention is delivered as a naked polynucleotide. The term “naked” polynucleotide, DNA or RNA refers to sequences that are free from any delivery vehicle that acts to assist, promote or facilitate entry into the cell, including viral sequences, viral particles, liposome formulations, lipofectin or precipitating agents and the like. However, the polynucleotide of the present invention can also be delivered in liposome formulations and lipofectin formulations and the like can be prepared by methods well known to those skilled in the art. Such methods are described, for example, in U.S. Pat. Nos. 5,593,972, 5,589,466, and 5,580,859, which are herein incorporated by reference.

[0442] The polynucleotide vector constructs used in the gene therapy method are preferably constructs that will not integrate into the host genome nor will they contain sequences that allow for replication. Appropriate vectors include pWLNEO, pSV2CAT, pOG44, pXT1 and pSG available from Stratagene; pSVK3, pBPV, pMSG and pSVL available from Pharmacia; and pEF1/V5, pcDNA3.1, and pRc/CMV2 available from Invitrogen. Other suitable vectors will be readily apparent to the skilled artisan.

[0443] Any strong promoter known to those skilled in the art can be used for driving the expression of the polynucleotide sequence. Suitable promoters include adenoviral promoters, such as the adenoviral major late promoter; or heterologous promoters, such as the cytomegalovirus (CMV) promoter; the respiratory syncytial virus (RSV) promoter; inducible promoters, such as the MMT promoter, the metallothionein promoter; heat shock promoters; the albumin promoter; the ApoAI promoter; human globin promoters; viral thymidine kinase promoters, such as the Herpes Simplex thymidine kinase promoter; retroviral LTRs; the b-actin promoter; and human growth hormone promoters. The promoter also may be the native promoter for the polynucleotide of the present invention.

[0444] Unlike other gene therapy techniques, one major advantage of introducing naked nucleic acid sequences into target cells is the transitory nature of the polynucleotide synthesis in the cells. Studies have shown that non-replicating DNA sequences can be introduced into cells to provide production of the desired polypeptide for periods of up to six months.

[0445] The polynucleotide construct can be delivered to the interstitial space of tissues within the an animal, including of muscle, skin, brain, lung, liver, spleen, bone marrow, thymus, heart, lymph, blood, bone, cartilage, pancreas, kidney, gall bladder, stomach, intestine, testis, ovary, uterus, rectum, nervous system, eye, gland, and connective tissue. Interstitial space of the tissues comprises the intercellular, fluid, mucopolysaccharide matrix among the reticular fibers of organ tissues, elastic fibers in the walls of vessels or chambers, collagen fibers of fibrous tissues, or that same matrix within connective tissue ensheathing muscle cells or in the lacunae of bone. It is similarly the space occupied by the plasma of the circulation and the lymph fluid of the lymphatic channels. Delivery to the interstitial space of muscle tissue is preferred for the reasons discussed below. They may be conveniently delivered by injection into the tissues comprising these cells. They are preferably delivered to and expressed in persistent, non-dividing cells which are differentiated, although delivery and expression may be achieved in non-differentiated or less completely differentiated cells, such as, for example, stem cells of blood or skin fibroblasts. In vivo muscle cells are particularly competent in their ability to take up and express polynucleotides.

[0446] For the naked nucleic acid sequence injection, an effective dosage amount of DNA or RNA will be in the range of from about 0.05 mg/kg body weight to about 50 mg/kg body weight. Preferably the dosage will be from about 0.005 mg/kg to about 20 mg/kg and more preferably from about 0.05 mg/kg to about 5 mg/kg. Of course, as the artisan of ordinary skill will appreciate, this dosage will vary according to the tissue site of injection. The appropriate and effective dosage of nucleic acid sequence can readily be determined by those of ordinary skill in the art and may depend on the condition being treated and the route of administration.

[0447] The preferred route of administration is by the parenteral route of injection into the interstitial space of tissues. However, other parenteral routes may also be used, such as, inhalation of an aerosol formulation particularly for delivery to lungs or bronchial tissues, throat or mucous membranes of the nose. In addition, naked DNA constructs can be delivered to arteries during angioplasty by the catheter used in the procedure.

[0448] The naked polynucleotides are delivered by any method known in the art, including, but not limited to, direct needle injection at the delivery site, intravenous injection, topical administration, catheter infusion, and so-called “gene guns”. These delivery methods are known in the art.

[0449] The constructs may also be delivered with delivery vehicles such as viral sequences, viral particles, liposome formulations, lipofectin, precipitating agents, etc. Such methods of delivery are known in the art.

[0450] In certain embodiments, the polynucleotide constructs are complexed in a liposome preparation. Liposomal preparations for use in the instant invention include cationic (positively charged), anionic (negatively charged) and neutral preparations. However, cationic liposomes are particularly preferred because a tight charge complex can be formed between the cationic liposome and the polyanionic nucleic acid. Cationic liposomes have been shown to mediate intracellular delivery of plasmid DNA (Felgner et al., Proc. Natl. Acad. Sci. USA (1987) 84:7413-7416, which is herein incorporated by reference); mRNA (Malone et al., Proc. Natl. Acad. Sci. USA (1989) 86:6077-6081, which is herein incorporated by reference); and purified transcription factors (Debs et al., J. Biol. Chem. (1990) 265:10189-10192, which is herein incorporated by reference), in functional form.

[0451] Cationic liposomes are readily available. For example, N[1-2,3-dioleyloxy)propyl]-N,N,N-triethylammonium (DOTMA) liposomes are particularly useful and are available under the trademark Lipofectin, from GIBCO BRL, Grand Island, N.Y. (See, also, Felgner et al., Proc. Natl Acad. Sci. USA (1987) 84:7413-7416, which is herein incorporated by reference). Other commercially available liposomes include transfectace (DDAB/DOPE) and DOTAP/DOPE (Boehringer).

[0452] Other cationic liposomes can be prepared from readily available materials using techniques well known in the art. See, e.g. PCT Publication No. WO 90/11092 (which is herein incorporated by reference) for a description of the synthesis of DOTAP (1,2-bis(oleoyloxy)-3-(trimethylammonio)propane) liposomes. Preparation of DOTMA liposomes is explained in the literature, see, e.g., P. Felgner et al., Proc. Natl. Acad. Sci. USA 84:7413-7417, which is herein incorporated by reference. Similar methods can be used to prepare liposomes from other cationic lipid materials. 14261 Similarly, anionic and neutral liposomes are readily available, such as from Avanti Polar Lipids (Birmingham, Ala.), or can be easily prepared using readily available materials. Such materials include phosphatidyl, choline, cholesterol, phosphatidyl ethanolamine, dioleoylphosphatidyl choline (DOPC), dioleoylphosphatidyl glycerol (DOPG), dioleoylphoshatidyl ethanolamine (DOPE), among others. These materials can also be mixed with the DOTMA and DOTAP starting materials in appropriate ratios. Methods for making liposomes using these materials are well known in the art.

[0453] For example, commercially dioleoylphosphatidyl choline (DOPC), dioleoylphosphatidyl glycerol (DOPG), and dioleoylphosphatidyl ethanolamine (DOPE) can be used in various combinations to make conventional liposomes, with or without the addition of cholesterol. Thus, for example, DOPG/DOPC vesicles can be prepared by drying 50 mg each of DOPG and DOPC under a stream of nitrogen gas into a sonication vial. The sample is placed under a vacuum pump overnight and is hydrated the following day with deionized water. The sample is then sonicated for 2 hours in a capped vial, using a Heat Systems model 350 sonicator equipped with an inverted cup (bath type) probe at the maximum setting while the bath is circulated at 15EC. Alternatively, negatively charged vesicles can be prepared without sonication to produce multilamellar vesicles or by extrusion through nucleopore membranes to produce unilamellar vesicles of discrete size. Other methods are known and available to those of skill in the art.

[0454] The liposomes can comprise multilamellar vesicles (MLVs), small unilamellar vesicles (SUWs), or large unilamellar vesicles (LUVs), with SUWs being preferred. The various liposome-nucleic acid complexes are prepared using methods well known in the art. See, e.g., Straubinger et al., Methods of Immunology (1983), 101:512-527, which is herein incorporated by reference. For example, MLVs containing nucleic acid can be prepared by depositing a thin film of phospholipid on the walls of a glass tube and subsequently hydrating with a solution of the material to be encapsulated. SUVs are prepared by extended sonication of MLVs to produce a homogeneous population of unilamellar liposomes. The material to be entrapped is added to a suspension of preformed MLVs and then sonicated. When using liposomes containing cationic lipids, the dried lipid film is resuspended in an appropriate solution such as sterile water or an isotonic buffer solution such as 10 mM Tris/NaCl, sonicated, and then the preformed liposomes are mixed directly with the DNA. The liposome and DNA form a very stable complex due to binding of the positively charged liposomes to the cationic DNA. SUVs find use with small nucleic acid fragments. LUVs are prepared by a number of methods, well known in the art. Commonly used methods include Ca²⁺-EDTA chelation (Papahadjopoulos et al., Biochim. Biophys. Acta (1975) 394:483; Wilson et al., Cell 17:77 (1979)); ether injection (Deamer, D. and Bangham, A., Biochim. Biophys. Acta 443:629 (1976); Ostro et al., Biochem. Biophys. Res. Commun. 76:836 (1977); Fraley et al., Proc. Natl. Acad. Sci. USA 76:3348 (1979)); detergent dialysis (Enoch, H. and Strittmatter, P., Proc. Natl. Acad. Sci. USA 76:145 (1979)); and reverse-phase evaporation (REV) (Fraley et al., J. Biol. Chem. 255:10431 (1980); Szoka, F. and Papahadjopoulos, D., Proc. Natl. Acad. Sci. USA 75:145 (1978); Schaefer-Ridder et al., Science 215:166 (1982)), which are herein incorporated by reference.

[0455] Generally, the ratio of DNA to liposomes will be from about 10:1 to about 1:10. Preferably, the ration will be from about 5:1 to about 1:5. More preferably, the ration will be about 3:1 to about 1:3. Still more preferably, the ratio will be about 1:1.

[0456] U.S. Pat. No. 5,676,954 (which is herein incorporated by reference) reports on the injection of genetic material, complexed with cationic liposomes carriers, into mice. U.S. Pat. Nos. 4,897,355, 4,946,787, 5,049,386, 5,459,127, 5,589,466, 5,693,622, 5,580,859, 5,703,055, and international publication no. WO 94/9469 (which are herein incorporated by reference) provide cationic lipids for use in transfecting DNA into cells and mammals. U.S. Pat. Nos. 5,589,466, 5,693,622, 5,580,859, 5,703,055, and international publication no. WO 94/9469 provide methods for delivering DNA-cationic lipid complexes to mammals.

[0457] In certain embodiments, cells are engineered, ex vivo or in vivo, using a retroviral particle containing RNA which comprises a sequence encoding a polypeptide of the present invention. Retroviruses from which the retroviral plasmid vectors may be derived include, but are not limited to, Moloney Murine Leukemia Virus, spleen necrosis virus, Rous sarcoma Virus, Harvey Sarcoma Virus, avian leukosis virus, gibbon ape leukemia virus, human immunodeficiency virus, Myeloproliferative Sarcoma Virus, and mammary tumor virus.

[0458] The retroviral plasmid vector is employed to transduce packaging cell lines to form producer cell lines. Examples of packaging cells which may be transfected include, but are not limited to, the PE501, PA317, R-2, R-AM, PA12, T19-14X, VT-19-17-H2, RCRE, RCRIP, GP+E-86, GP+envAm12, and DAN cell lines as described in Miller, Human Gene Therapy 1:5-14 (1990), which is incorporated herein by reference in its entirety. The vector may transduce the packaging cells through any means known in the art. Such means include, but are not limited to, electroporation, the use of liposomes, and CaPO₄ precipitation. In one alternative, the retroviral plasmid vector may be encapsulated into a liposome, or coupled to a lipid, and then administered to a host.

[0459] The producer cell line generates infectious retroviral vector particles which include polynucleotide encoding a polypeptide of the present invention. Such retroviral vector particles then may be employed, to transduce eukaryotic cells, either in vitro or in vivo. The transduced eukaryotic cells will express a polypeptide of the present invention.

[0460] In certain other embodiments, cells are engineered, ex vivo or in vivo, with polynucleotide contained in an adenovirus vector. Adenovirus can be manipulated such that it encodes and expresses a polypeptide of the present invention, and at the same time is inactivated in terms of its ability to replicate in a normal lytic viral life cycle. Adenovirus expression is achieved without integration of the viral DNA into the host cell chromosome, thereby alleviating concerns about insertional mutagenesis. Furthermore, adenoviruses have been used as live enteric vaccines for many years with an excellent safety profile (Schwartz et al. Am. Rev. Respir. Dis.109:233-238 (1974)). Finally, adenovirus mediated gene transfer has been demonstrated in a number of instances including transfer of alpha-l-antitrypsin and CFTR to the lungs of cotton rats (Rosenfeld, M. A. et al. (1991) Science 252:431-434; Rosenfeld et al., (1992) Cell 68:143-155). Furthermore, extensive studies to attempt to establish adenovirus as a causative agent in human cancer were uniformly negative (Green, M. et al. (1979) Proc. Natl. Acad. Sci. USA 76:6606).

[0461] Suitable adenoviral vectors useful in the present invention are described, for example, in Kozarsky and Wilson, Curr. Opin. Genet. Devel. 3:499-503 (1993); Rosenfeld et al., Cell 68:143-155 (1992); Engelhardt et al., Human Genet. Ther. 4:759-769 (1993); Yang et al., Nature Genet. 7:362-369 (1994); Wilson et al., Nature 365:691-692 (1993); and U.S. Pat. No. 5,652,224, which are herein incorporated by reference. For example, the adenovirus vector Ad2 is useful and can be grown in human 293 cells. These cells contain the E1 region of adenovirus and constitutively express E1a and E1b, which complement the defective adenoviruses by providing the products of the genes deleted from the vector. In addition to Ad2, other varieties of adenovirus (e.g., Ad3, Ad5, and Ad7) are also useful in the present invention.

[0462] Preferably, the adenoviruses used in the present invention are replication deficient. Replication deficient adenoviruses require the aid of a helper virus and/or packaging cell line to form infectious particles. The resulting virus is capable of infecting cells and can express a polynucleotide of interest which is operably linked to a promoter, but cannot replicate in most cells. Replication deficient adenoviruses may be deleted in one or more of all or a portion of the following genes: E1a, E1b, E3, E4, E2a, or LI through L5.

[0463] In certain other embodiments, the cells are engineered, ex vivo or in vivo, using an adeno-associated virus (AAV). AAVs are naturally occurring defective viruses that require helper viruses to produce infectious particles (Muzyczka, N., Curr. Topics in Microbiol. Immunol. 158:97 (1992)). It is also one of the few viruses that may integrate its DNA into non-dividing cells. Vectors containing as little as 300 base pairs of AAV can be packaged and can integrate, but space for exogenous DNA is limited to about 4.5 kb. Methods for producing and using such AAVs are known in the art. See, for example, U.S. Pat. Nos. 5,139,941, 5,173,414, 5,354,678, 5,436,146, 5,474,935, 5,478,745, and 5,589,377.

[0464] For example, an appropriate AAV vector for use in the present invention will include all the sequences necessary for DNA replication, encapsidation, and host-cell integration. The polynucleotide construct is inserted into the AAV vector using standard cloning methods, such as those found in Sambrook et al., Molecular Cloning: A Laboratory Manual, Cold Spring Harbor Press (1989). The recombinant AAV vector is then transfected into packaging cells which are infected with a helper virus, using any standard technique, including lipofection, electroporation, calcium phosphate precipitation, etc. Appropriate helper viruses include adenoviruses, cytomegaloviruses, vaccinia viruses, or herpes viruses. Once the packaging cells are transfected and infected, they will produce infectious AAV viral particles which contain the polynucleotide construct. These viral particles are then used to transduce eukaryotic cells, either ex vivo or in vivo. The transduced cells will contain the polynucleotide construct integrated into its genome, and will express a polypeptide of the invention.

[0465] Another method of gene therapy involves operably associating heterologous control regions and endogenous polynucleotide sequences (e.g. encoding a polypeptide of the present invention) via homologous recombination (see, e.g., U.S. Pat. No. 5,641,670, issued Jun. 24, 1997; International Publication No. WO 96/2941 1, published Sep. 26, 1996; International Publication No. WO 94/12650, published Aug. 4, 1994; Koller et al., Proc. Natl. Acad. Sci. USA 86:8932-8935 (1989); and Zijlstra et al., Nature 342:435-438 (1989), which are herein encorporated by reference. This method involves the activation of a gene which is present in the target cells, but which is not normally expressed in the cells, or is expressed at a lower level than desired.

[0466] Polynucleotide constructs are made, using standard techniques known in the art, which contain the promoter with targeting sequences flanking the promoter. Suitable promoters are described herein. The targeting sequence is sufficiently complementary to an endogenous sequence to permit homologous recombination of the promoter-targeting sequence with the endogenous sequence. The targeting sequence will be sufficiently near the 5′ end of the desired endogenous polynucleotide sequence so the promoter will be operably linked to the endogenous sequence upon homologous recombination.

[0467] The promoter and the targeting sequences can be amplified using PCR. Preferably, the amplified promoter contains distinct restriction enzyme sites on the 5′ and 3′ ends. Preferably, the 3′ end of the first targeting sequence contains the same restriction enzyme site as the 5′ end of the amplified promoter and the 5′ end of the second targeting sequence contains the same restriction site as the 3′ end of the amplified promoter. The amplified promoter and targeting sequences are digested and ligated together.

[0468] The promoter-targeting sequence construct is delivered to the cells, either as naked polynucleotide, or in conjunction with transfection-facilitating agents, such as liposomes, viral sequences, viral particles, whole viruses, lipofection, precipitating agents, etc., described in more detail above. The P promoter-targeting sequence can be delivered by any method, included direct needle injection, intravenous injection, topical administration, catheter infusion, particle accelerators, etc. The methods are described in more detail below.

[0469] The promoter-targeting sequence construct is taken up by cells. Homologous recombination between the construct and the endogenous sequence takes place, such that an endogenous sequence is placed under the control of the promoter. The promoter then drives the expression of the endogenous sequence.

[0470] The polynucleotide encoding a polypeptide of the present invention may contain a secretory signal sequence that facilitates secretion of the protein. Typically, the signal sequence is positioned in the coding region of the polynucleotide to be expressed towards or at the 5′ end of the coding region. The signal sequence may be homologous or heterologous to the polynucleotide of interest and may be homologous or heterologous to the cells to be transfected. Additionally, the signal sequence may be chemically synthesized using methods known in the art.

[0471] Any mode of administration of any of the above-described polynucleotides constructs can be used so long as the mode results in the expression of one or more molecules in an amount sufficient to provide a therapeutic effect. This includes direct needle injection, systemic injection, catheter infusion, biolistic injectors, particle accelerators (i.e., “gene guns”), gelfoam sponge depots, other commercially available depot materials, osmotic pumps (e.g., Alza minipumps), oral or suppositorial solid (tablet or pill) pharmaceutical formulations, and decanting or topical applications during surgery. For example, direct injection of naked calcium phosphate-precipitated plasmid into rat liver and rat spleen or a protein-coated plasmid into the portal vein has resulted in gene expression of the foreign gene in the rat livers (Kaneda et al., Science 243:375 (1989)).

[0472] A preferred method of local administration is by direct injection. Preferably, a recombinant molecule of the present invention complexed with a delivery vehicle is administered by direct injection into or locally within the area of arteries. Administration of a composition locally within the area of arteries refers to injecting the composition centimeters and preferably, millimeters within arteries.

[0473] Another method of local administration is to contact a polynucleotide construct of the present invention in or around a surgical wound. For example, a patient can undergo surgery and the polynucleotide construct can be coated on the surface of tissue inside the wound or the construct can be injected into areas of tissue inside the wound.

[0474] Therapeutic compositions useful in systemic administration, include recombinant molecules of the present invention complexed to a targeted delivery vehicle of the present invention. Suitable delivery vehicles for use with systemic administration comprise liposomes comprising ligands for targeting the vehicle to a particular site. In specific embodiments, suitable delivery vehicles for use with systemic administration comprise liposomes comprising polypeptides of the invention for targeting the vehicle to a particular site.

[0475] Preferred methods of systemic administration, include intravenous injection, aerosol, oral and percutaneous (topical) delivery. Intravenous injections can be performed using methods standard in the art. Aerosol delivery can also be performed using methods standard in the art (see, for example, Stribling et al., Proc. Natl. Acad. Sci. USA 189:11277-11281, 1992, which is incorporated herein by reference). Oral delivery can be performed by complexing a polynucleotide construct of the present invention to a carrier capable of withstanding degradation by digestive enzymes in the gut of an animal. Examples of such carriers, include plastic capsules or tablets, such as those known in the art. Topical delivery can be performed by mixing a polynucleotide construct of the present invention with a lipophilic reagent (e.g., DMSO) that is capable of passing into the skin.

[0476] Determining an effective amount of substance to be delivered can depend upon a number of factors including, for example, the chemical structure and biological activity of the substance, the age and weight of the animal, the precise condition requiring treatment and its severity, and the route of administration. The frequency of treatments depends upon a number of factors, such as the amount of polynucleotide constructs administered per dose, as well as the health and history of the subject. The precise amount, number of doses, and timing of doses will be determined by the attending physician or veterinarian.

[0477] Therapeutic compositions of the present invention can be administered to any animal, preferably to mammals and birds. Preferred mammals include humans, dogs, cats, mice, rats, rabbits sheep, cattle, horses and pigs, with humans being particularly preferred.

[0478] Biological Activities

[0479] Polynucleotides or polypeptides, or agonists or antagonists of the present invention, can be used in assays to test for one or more biological activities. If these polynucleotides or polypeptides, or agonists or antagonists of the present invention, do exhibit activity in a particular assay, it is likely that these molecules may be involved in the diseases associated with the biological activity. Thus, the polynucleotides and polypeptides, and agonists or antagonists could be used to diagnose, prognose, prevent and/or treat the associated disease.

[0480] Members of the extracellular matrix family of proteins are believed to be involved in biological activities associated with the extracellular matrix. Accordingly, compositions of the invention (including polynucleotides, polypeptides and antibodies of the invention, and fragments and variants thereof) may be used in the diagnosis, prognosis, prevention and/or treatment of diseases and/or disorders associated with aberrant extracellular matrix activity.

[0481] In preferred embodiments, compositions of the invention (including polynucleotides, polypeptides and antibodies of the invention, and fragments and variants thereof) may be used in the diagnosis, prognosis, prevention and/or treatment of diseases and/or disorders relating to blood disorders (e.g., blood coagulation disorders, aberrant wound-healing, and/or as described under “Immune activity” and “Cardiovascular Disorders” below), immune system disorders (e.g., arthritis, inflammation, and/or as described under “Immune activity” below), atherosclerosis, osteoporosis, and neoplastic disorders (e.g., cancers, cell migration, extracellular matrix turnover, and/or as described under “Hyperproliferative Disorders” below).

[0482] In certain embodiments, a polypeptide of the invention, or polynucleotides, antibodies, agonists, or antagonists corresponding to that polypeptide, may be used to diagnose and/or prognose diseases and/or disorders associated with the tissue(s) in which the polypeptide of the invention is expressed, including one, two, three, four, five, or more of the tissues disclosed in Table 1a, column 8 (Tissue Distribution Library Code).

[0483] Thus, polynucleotides, translation products and antibodies of the invention are useful in the diagnosis, prognosis, prevention and/or treatment of diseases and/or disorders associated with activities that include, but are not limited to, aberrant wound-healing, osteoporosis, atherosclerosis, arthritis, coagulation disorders, inflammation, and cancers.

[0484] More generally, polynucleotides, translation products and antibodies corresponding to this gene may be useful for the diagnosis, prognosis, prevention and/or treatment of diseases and/or disorders associated with the following systems.

[0485] Immune Activity

[0486] Polynucleotides, polypeptides, antibodies, and/or agonists or antagonists of the present invention may be useful in treating, preventing, diagnosing and/or prognosing diseases, disorders, and/or conditions of the immune system, by, for example, activating or inhibiting the proliferation, differentiation, or mobilization (chemotaxis) of immune cells. Immune cells develop through a process called hematopoiesis, producing myeloid (platelets, red blood cells, neutrophils, and macrophages) and lymphoid (B and T lymphocytes) cells from pluripotent stem cells. The etiology of these immune diseases, disorders, and/or conditions may be genetic, somatic, such as cancer and some autoimmune diseases, acquired (e.g., by chemotherapy or toxins), or infectious. Moreover, polynucleotides, polypeptides, antibodies, and/or agonists or antagonists of the present invention can be used as a marker or detector of a particular immune system disease or disorder.

[0487] In another embodiment, a polypeptide of the invention, or polynucleotides, antibodies, agonists, or antagonists corresponding to that polypeptide, may be used to treat diseases and disorders of the immune system and/or to inhibit or enhance an immune response generated by cells associated with the tissue(s) in which the polypeptide of the invention is expressed, including one, two, three, four, five, or more tissues disclosed in Table 1A, column 8 (Tissue Distribution Library Code).

[0488] Polynucleotides, polypeptides, antibodies, and/or agonists or antagonists of the present invention may be useful in treating, preventing, diagnosing, and/or prognosing immunodeficiencies, including both congenital and acquired immunodeficiencies. Examples of B cell immunodeficiencies in which immunoglobulin levels B cell function and/or B cell numbers are decreased include: X-linked agammaglobulinemia (Bruton's disease), X-linked infantile agammaglobulinemia, X-linked immunodeficiency with hyper IgM, non X-linked immunodeficiency with hyper IgM, X-linked lymphoproliferative syndrome (XLP), agammaglobulinemia including congenital and acquired agammaglobulinemia, adult onset agammaglobulinemia, late-onset agammaglobulinemia, dysgammaglobulinemia, hypogammaglobulinemia, unspecified hypogammaglobulinemia, recessive agammaglobulinemia (Swiss type), Selective IgM deficiency, selective IgA deficiency, selective IgG subclass deficiencies, IgG subclass deficiency (with or without IgA deficiency), Ig deficiency with increased IgM, IgG and IgA deficiency with increased IgM, antibody deficiency with normal or elevated Igs, Ig heavy chain deletions, kappa chain deficiency, B cell lymphoproliferative disorder (BLPD), common variable immunodeficiency (CVID), common variable immunodeficiency (CVI) (acquired), and transient hypogammaglobulinemia of infancy.

[0489] In specific embodiments, ataxia-telangiectasia or conditions associated with ataxia-telangiectasia are treated, prevented, diagnosed, and/or prognosing using the polypeptides or polynucleotides of the invention, and/or agonists or antagonists thereof.

[0490] Examples of congenital immunodeficiencies in which T cell and/or B cell function and/or number is decreased include, but are not limited to: DiGeorge anomaly, severe combined immunodeficiencies (SCID) (including, but not limited to, X-linked SCID, autosomal recessive SCID, adenosine deaminase deficiency, purine nucleoside phosphorylase (PNP) deficiency, Class II MHC deficiency (Bare lymphocyte syndrome), Wiskott-Aldrich syndrome, and ataxia telangiectasia), thymic hypoplasia, third and fourth pharyngeal pouch syndrome, 22q11.2 deletion, chronic mucocutaneous candidiasis, natural killer cell deficiency (NK), idiopathic CD4+ T-lymphocytopenia, immunodeficiency with predominant T cell defect (unspecified), and unspecified immunodeficiency of cell mediated immunity.

[0491] In specific embodiments, DiGeorge anomaly or conditions associated with DiGeorge anomaly are treated, prevented, diagnosed, and/or prognosed using polypeptides or polynucleotides of the invention, or antagonists or agonists thereof.

[0492] Other immunodeficiencies that may be treated, prevented, diagnosed, and/or prognosed using polypeptides or polynucleotides of the invention, and/or agonists or antagonists thereof, include, but are not limited to, chronic granulomatous disease, Chediak-Higashi syndrome, myeloperoxidase deficiency, leukocyte glucose-6-phosphate dehydrogenase deficiency, X-linked lymphoproliferative syndrome (XLP), leukocyte adhesion deficiency, complement component deficiencies (including Cl, C2, C3, C4, C5, C6, C7, C8 and/or C9 deficiencies), reticular dysgenesis, thymic alymphoplasia-aplasia, immunodeficiency with thymoma, severe congenital leukopenia, dysplasia with immunodeficiency, neonatal neutropenia, short limbed dwarfism, and Nezelof syndrome-combined immunodeficiency with Igs.

[0493] In a preferred embodiment, the immunodeficiencies and/or conditions associated with the immunodeficiencies recited above are treated, prevented, diagnosed and/or prognosed using polynucleotides, polypeptides, antibodies, and/or agonists or antagonists of the present invention.

[0494] In a preferred embodiment polynucleotides, polypeptides, antibodies, and/or agonists or antagonists of the present invention could be used as an agent to boost immunoresponsiveness among immunodeficient individuals. In specific embodiments, polynucleotides, polypeptides, antibodies, and/or agonists or antagonists of the present invention could be used as an agent to boost immunoresponsiveness among B cell and/or T cell immunodeficient individuals.

[0495] The polynucleotides, polypeptides, antibodies, and/or agonists or antagonists of the present invention may be useful in treating, preventing, diagnosing and/or prognosing autoimmune disorders. Many autoimmune disorders result from inappropriate recognition of self as foreign material by immune cells. This inappropriate recognition results in an immune response leading to the destruction of the host tissue. Therefore, the administration of polynucleotides and polypeptides of the invention that can inhibit an immune response, particularly the proliferation, differentiation, or chemotaxis of T-cells, may be an effective therapy in preventing autoimmune disorders.

[0496] Autoimmune diseases or disorders that may be treated, prevented, diagnosed and/or prognosed by polynucleotides, polypeptides, antibodies, and/or agonists or antagonists of the present invention include, but are not limited to, one or more of the following: systemic lupus erythematosus, rheumatoid arthritis, ankylosing spondylitis, multiple sclerosis, autoimmune thyroiditis, Hashimoto's thyroiditis, autoimmune hemolytic anemia, hemolytic anemia, thrombocytopenia, autoimmune thrombocytopenia purpura, autoimmune neonatal thrombocytopenia, idiopathic thrombocytopenia purpura, purpura (e.g., Henloch-Scoenlein purpura), autoimmunocytopenia, Goodpasture's syndrome, Pemphigus vulgaris, myasthenia gravis, Grave's disease (hyperthyroidism), and insulin-resistant diabetes mellitus.

[0497] Additional disorders that are likely to have an autoimmune component that may be treated, prevented, and/or diagnosed with the compositions of the invention include, but are not limited to, type II collagen-induced arthritis, antiphospholipid syndrome, dermatitis, allergic encephalomyelitis, myocarditis, relapsing polychondritis, rheumatic heart disease, neuritis, uveitis ophthalmia, polyendocrinopathies, Reiter's Disease, Stiff-Man Syndrome, autoimmune pulmonary inflammation, autism, Guillain-Barre Syndrome, insulin dependent diabetes mellitus, and autoimmune inflammatory eye disorders.

[0498] Additional disorders that are likely to have an autoimmune component that may be treated, prevented, diagnosed and/or prognosed with the compositions of the invention include, but are not limited to, scleroderma with anti-collagen antibodies (often characterized, e.g., by nucleolar and other nuclear antibodies), mixed connective tissue disease (often characterized, e.g., by antibodies to extractable nuclear antigens (e.g., ribonucleoprotein)), polymyositis (often characterized, e.g., by nonhistone ANA), pernicious anemia (often characterized, e.g., by antiparietal cell, microsomes, and intrinsic factor antibodies), idiopathic Addison's disease (often characterized, e.g., by humoral and cell-mediated adrenal cytotoxicity, infertility (often characterized, e.g., by antispermatozoal antibodies), glomerulonephritis (often characterized, e.g., by glomerular basement membrane antibodies or inmmune complexes), bullous pemphigoid (often characterized, e.g., by IgG and complement in basement membrane), Sjogren's syndrome (often characterized, e.g., by multiple tissue antibodies, and/or a specific nonhistone ANA (SS-B)), diabetes mellitus (often characterized, e.g., by cell-mediated and humoral islet cell antibodies), and adrenergic drug resistance (including adrenergic drug resistance with asthma or cystic fibrosis) (often characterized, e.g., by beta-adrenergic receptor antibodies).

[0499] Additional disorders that may have an autoimmune component that may be treated, prevented, diagnosed and/or prognosed with the compositions of the invention include, but are not limited to, chronic active hepatitis (often characterized, e.g., by smooth muscle antibodies), primary biliary cirrhosis (often characterized, e.g., by mitochondria antibodies), other endocrine gland failure (often characterized, e.g., by specific tissue antibodies in some cases), vitiligo (often characterized, e.g., by melanocyte antibodies), vasculitis (often characterized, e.g., by Ig and complement in vessel walls and/or low serum complement), post-MI (often characterized, e.g., by myocardial antibodies), cardiotomy syndrome (often characterized, e.g., by myocardial antibodies), urticaria (often characterized, e.g., by IgG and IgM antibodies to IgE), atopic dermatitis (often characterized, e.g., by IgG and IgM antibodies to IgE), asthma (often characterized, e.g., by IgG and IgM antibodies to IgE), and many other inflammatory, granulomatous, degenerative, and atrophic disorders.

[0500] In a preferred embodiment, the autoimmune diseases and disorders and/or conditions associated with the diseases and disorders recited above are treated, prevented, diagnosed and/or prognosed using for example, antagonists or agonists, polypeptides or polynucleotides, or antibodies of the present invention. In a specific preferred embodiment, rheumatoid arthritis is treated, prevented, and/or diagnosed using polynucleotides, polypeptides, antibodies, and/or agonists or antagonists of the present invention.

[0501] In another specific preferred embodiment, systemic lupus erythematosus is treated, prevented, and/or diagnosed using polynucleotides, polypeptides, antibodies, and/or agonists or antagonists of the present invention. In another specific preferred embodiment, idiopathic thrombocytopenia purpura is treated, prevented, and/or diagnosed using polynucleotides, polypeptides, antibodies, and/or agonists or antagonists of the present invention.

[0502] In another specific preferred embodiment IgA nephropathy is treated, prevented, and/or diagnosed using polynucleotides, polypeptides, antibodies, and/or agonists or antagonists of the present invention.

[0503] In a preferred embodiment, the autoimmune diseases and disorders and/or conditions associated with the diseases and disorders recited above are treated, prevented, diagnosed and/or prognosed using polynucleotides, polypeptides, antibodies, and/or agonists or antagonists of the present invention

[0504] In preferred embodiments, polypeptides, antibodies, polynucleotides and/or agonists or antagonists of the present invention are used as a immunosuppressive agent(s).

[0505] Polynucleotides, polypeptides, antibodies, and/or agonists or antagonists of the present invention may be useful in treating, preventing, prognosing, and/or diagnosing diseases, disorders, and/or conditions of hematopoietic cells. Polynucleotides, polypeptides, antibodies, and/or agonists or antagonists of the present invention could be used to increase differentiation and proliferation of hematopoietic cells, including the pluripotent stem cells, in an effort to treat or prevent those diseases, disorders, and/or conditions associated with a decrease in certain (or many) types hematopoietic cells, including but not limited to, leukopenia, neutropenia, anemia, and thrombocytopenia. Alternatively, Polynucleotides, polypeptides, antibodies, and/or agonists or antagonists of the present invention could be used to increase differentiation and proliferation of hematopoietic cells, including the pluripotent stem cells, in an effort to treat or prevent those diseases, disorders, and/or conditions associated with an increase in certain (or many) types of hematopoietic cells, including but not limited to, histiocytosis.

[0506] Allergic reactions and conditions, such as asthma (particularly allergic asthma) or other respiratory problems, may also be treated, prevented, diagnosed and/or prognosed using polypeptides, antibodies, or polynucleotides of the invention, and/or agonists or antagonists thereof. Moreover, these molecules can be used to treat, prevent, prognose, and/or diagnose anaphylaxis, hypersensitivity to an antigenic molecule, or blood group incompatibility.

[0507] Additionally, polypeptides or polynucleotides of the invention, and/or agonists or antagonists thereof, may be used to treat, prevent, diagnose and/or prognose IgE-mediated allergic reactions. Such allergic reactions include, but are not limited to, asthma, rhinitis, and eczema. In specific embodiments, polynucleotides, polypeptides, antibodies, and/or agonists or antagonists of the present invention may be used to modulate IgE concentrations in vitro or in vivo.

[0508] Moreover, polynucleotides, polypeptides, antibodies, and/or agonists or antagonists of the present invention have uses in the diagnosis, prognosis, prevention, and/or treatment of inflammatory conditions. For example, since polypeptides, antibodies, or polynucleotides of the invention, and/or agonists or antagonists of the invention may inhibit the activation, proliferation and/or differentiation of cells involved in an inflammatory response, these molecules can be used to prevent and/or treat chronic and acute inflammatory conditions. Such inflammatory conditions include, but are not limited to, for example, inflammation associated with infection (e.g., septic shock, sepsis, or systemic inflammatory response syndrome), ischemia-reperfusion injury, endotoxin lethality, complement-mediated hyperacute rejection, nephritis, cytokine or chemokine induced lung injury, inflammatory bowel disease, Crohn's disease, over production of cytokines (e.g., TNF or IL-1.), respiratory disorders (e.g., asthma and allergy); gastrointestinal disorders (e.g., inflammatory bowel disease); cancers (e.g., gastric, ovarian, lung, bladder, liver, and breast); CNS disorders (e.g., multiple sclerosis; ischemic brain injury and/or stroke, traumatic brain injury, neurodegenerative disorders (e.g., Parkinson's disease and Alzheimer's disease); AIDS-related dementia; and prion disease); cardiovascular disorders (e.g., atherosclerosis, myocarditis, cardiovascular disease, and cardiopulmonary bypass complications); as well as many additional diseases, conditions, and disorders that are characterized by inflammation (e.g., hepatitis, rheumatoid arthritis, gout, trauma, pancreatitis, sarcoidosis, dermatitis, renal ischemia-reperfusion injury, Grave's disease, systemic lupus erythematosus, diabetes mellitus, and allogenic transplant rejection).

[0509] Because inflammation is a fundamental defense mechanism, inflammatory disorders can effect virtually any tissue of the body. Accordingly, polynucleotides, polypeptides, and antibodies of the invention, as well as agonists or antagonists thereof, have uses in the treatment of tissue-specific inflammatory disorders, including, but not limited to, adrenalitis, alveolitis, angiocholecystitis, appendicitis, balanitis, blepharitis, bronchitis, bursitis, carditis, cellulitis, cervicitis, cholecystitis, chorditis, cochlitis, colitis, conjunctivitis, cystitis, dermatitis, diverticulitis, encephalitis, endocarditis, esophagitis, eustachitis, fibrositis, folliculitis, gastritis, gastroenteritis, gingivitis, glossitis, hepatosplenitis, keratitis, labyrinthitis, laryngitis, lymphangitis, mastitis, media otitis, meningitis, metritis, mucitis, myocarditis, myosititis, myringitis, nephritis, neuritis, orchitis, osteochondritis, otitis, pericarditis, peritendonitis, peritonitis, pharyngitis, phlebitis, poliomyelitis, prostatitis, pulpitis, retinitis, rhinitis, salpingitis, scleritis, sclerochoroiditis, scrotitis, sinusitis, spondylitis, steatitis, stomatitis, synovitis, syringitis, tendonitis, tonsillitis, urethritis, and vaginitis.

[0510] In specific embodiments, polypeptides, antibodies, or polynucleotides of the invention, and/or agonists or antagonists thereof, are useful to diagnose, prognose, prevent, and/or treat organ transplant rejections and graft-versus-host disease. Organ rejection occurs by host immune cell destruction of the transplanted tissue through an immune response. Similarly, an immune response is also involved in GVHD, but, in this case, the foreign transplanted immune cells destroy the host tissues. Polypeptides, antibodies, or polynucleotides of the invention, and/or agonists or antagonists thereof, that inhibit an immune response, particularly the activation, proliferation, differentiation, or chemotaxis of T-cells, may be an effective therapy in preventing organ rejection or GVHD. In specific embodiments, polypeptides, antibodies, or polynucleotides of the invention, and/or agonists or antagonists thereof, that inhibit an immune response, particularly the activation, proliferation, differentiation, or chemotaxis of T-cells, may be an effective therapy in preventing experimental allergic and hyperacute xenograft rejection.

[0511] In other embodiments, polypeptides, antibodies, or polynucleotides of the invention, and/or agonists or antagonists thereof, are useful to diagnose, prognose, prevent, and/or treat immune complex diseases, including, but not limited to, serum sickness, post streptococcal glomerulonephritis, polyarteritis nodosa, and immune complex-induced vasculitis.

[0512] Polypeptides, antibodies, polynucleotides and/or agonists or antagonists of the invention can be used to treat, detect, and/or prevent infectious agents. For example, by increasing the immune response, particularly increasing the proliferation activation and/or differentiation of B and/or T cells, infectious diseases may be treated, detected, and/or prevented. The immune response may be increased by either enhancing an existing immune response, or by initiating a new immune response. Alternatively, polynucleotides, polypeptides, antibodies, and/or agonists or antagonists of the present invention may also directly inhibit the infectious agent (refer to section of application listing infectious agents, etc), without necessarily eliciting an immune response.

[0513] In another embodiment, polypeptides, antibodies, polynucleotides and/or agonists or antagonists of the present invention are used as a vaccine adjuvant that enhances immune responsiveness to an antigen. In a specific embodiment, polypeptides, antibodies, polynucleotides and/or agonists or antagonists of the present invention are used as an adjuvant to enhance tumor-specific immune responses.

[0514] In another specific embodiment, polypeptides, antibodies, polynucleotides and/or agonists or antagonists of the present invention are used as an adjuvant to enhance anti-viral immune responses. Anti-viral immune responses that may be enhanced using the compositions of the invention as an adjuvant, include virus and virus associated diseases or symptoms described herein or otherwise known in the art. In specific embodiments, the compositions of the invention are used as an adjuvant to enhance an immune response to a virus, disease, or symptom selected from the group consisting of: AIDS, meningitis, Dengue, EBV, and hepatitis (e.g., hepatitis B). In another specific embodiment, the compositions of the invention are used as an adjuvant to enhance an immune response to a virus, disease, or symptom selected from the group consisting of: HIV/AIDS, respiratory syncytial virus, Dengue, rotavirus, Japanese B encephalitis, influenza A and B, parainfluenza, measles, cytomegalovirus, rabies, Junin, Chikungunya, Rift Valley Fever, herpes simplex, and yellow fever.

[0515] In another specific embodiment, polypeptides, antibodies, polynucleotides and/or agonists or antagonists of the present invention are used as an adjuvant to enhance anti-bacterial or anti-fungal immune responses. Anti-bacterial or anti-fungal immune responses that may be enhanced using the compositions of the invention as an adjuvant, include bacteria or fungus and bacteria or fungus associated diseases or symptoms described herein or otherwise known in the art. In specific embodiments, the compositions of the invention are used as an adjuvant to enhance an immune response to a bacteria or fungus, disease, or symptom selected from the group consisting of: tetanus, Diphtheria, botulism, and meningitis type B.

[0516] In another specific embodiment, the compositions of the invention are used as an adjuvant to enhance an immune response to a bacteria or fungus, disease, or symptom selected from the group consisting of: Vibrio cholerae, Mycobacterium leprae, Salmonella typhi, Salmonella paratyphi, Meisseria meningitidis, Streptococcus pneumoniae, Group B streptococcus, Shigella spp., Enterotoxigenic Escherichia coli, Enterohemorrhagic E. coli, and Borrelia burgdorferi.

[0517] In another specific embodiment, polypeptides, antibodies, polynucleotides and/or agonists or antagonists of the present invention are used as an adjuvant to enhance anti-parasitic immune responses. Anti-parasitic immune responses that may be enhanced using the compositions of the invention as an adjuvant, include parasite and parasite associated diseases or symptoms described herein or otherwise known in the art. In specific embodiments, the compositions of the invention are used as an adjuvant to enhance an immune response to a parasite. In another specific embodiment, the compositions of the invention are used as an adjuvant to enhance an immune response to Plasmodium (malaria) or Leishmania.

[0518] In another specific embodiment, polypeptides, antibodies, polynucleotides and/or agonists or antagonists of the present invention may also be employed to treat infectious diseases including silicosis, sarcoidosis, and idiopathic pulmonary fibrosis; for example, by preventing the recruitment and activation of mononuclear phagocytes.

[0519] In another specific embodiment, polypeptides, antibodies, polynucleotides and/or agonists or antagonists of the present invention are used as an antigen for the generation of antibodies to inhibit or enhance immune mediated responses against polypeptides of the invention.

[0520] In one embodiment, polypeptides, antibodies, polynucleotides and/or agonists or antagonists of the present invention are administered to an animal (e.g., mouse, rat, rabbit, hamster, guinea pig, pigs, micro-pig, chicken, camel, goat, horse, cow, sheep, dog, cat, non-human primate, and human, most preferably human) to boost the immune system to produce increased quantities of one or more antibodies (e.g., IgG, IgA, IgM, and IgE), to induce higher affinity antibody production and immunoglobulin class switching (e.g., IgG, IgA, IgM, and IgE), and/or to increase an immune response.

[0521] In another specific embodiment, polypeptides, antibodies, polynucleotides and/or agonists or antagonists of the present invention are used as a stimulator of B cell responsiveness to pathogens.

[0522] In another specific embodiment, polypeptides, antibodies, polynucleotides and/or agonists or antagonists of the present invention are used as an activator of T cells.

[0523] In another specific embodiment, polypeptides, antibodies, polynucleotides and/or agonists or antagonists of the present invention are used as an agent that elevates the immune status of an individual prior to their receipt of immunosuppressive therapies.

[0524] In another specific embodiment, polypeptides, antibodies, polynucleotides and/or agonists or antagonists of the present invention are used as an agent to induce higher affinity antibodies.

[0525] In another specific embodiment, polypeptides, antibodies, polynucleotides and/or agonists or antagonists of the present invention are used as an agent to increase serum immunoglobulin concentrations.

[0526] In another specific embodiment, polypeptides, antibodies, polynucleotides and/or agonists or antagonists of the present invention are used as an agent to accelerate recovery of immunocompromised individuals.

[0527] In another specific embodiment, polypeptides, antibodies, polynucleotides and/or agonists or antagonists of the present invention are used as an agent to boost immunoresponsiveness among aged populations and/or neonates.

[0528] In another specific embodiment, polypeptides, antibodies, polynucleotides and/or agonists or antagonists of the present invention are used as an immune system enhancer prior to, during, or after bone marrow transplant and/or other transplants (e.g., allogeneic or xenogeneic organ transplantation). With respect to transplantation, compositions of the invention may be administered prior to, concomitant with, and/or after transplantation. In a specific embodiment, compositions of the invention are administered after transplantation, prior to the beginning of recovery of T-cell populations. In another specific embodiment, compositions of the invention are first administered after transplantation after the beginning of recovery of T cell populations, but prior to full recovery of B cell populations.

[0529] In another specific embodiment, polypeptides, antibodies, polynucleotides and/or agonists or antagonists of the present invention are used as an agent to boost immunoresponsiveness among individuals having an acquired loss of B cell function. Conditions resulting in an acquired loss of B cell function that may be ameliorated or treated by administering the polypeptides, antibodies, polynucleotides and/or agonists or antagonists thereof, include, but are not limited to, HIV Infection, AIDS, bone marrow transplant, and B cell chronic lymphocytic leukemia (CLL).

[0530] In another specific embodiment, polypeptides, antibodies, polynucleotides and/or agonists or antagonists of the present invention are used as an agent to boost immunoresponsiveness among individuals having a temporary immune deficiency. Conditions resulting in a temporary immune deficiency that may be ameliorated or treated by administering the polypeptides, antibodies, polynucleotides and/or agonists or antagonists thereof, include, but are not limited to, recovery from viral infections (e.g., influenza), conditions associated with malnutrition, recovery from infectious mononucleosis, or conditions associated with stress, recovery from measles, recovery from blood transfusion, and recovery from surgery.

[0531] In another specific embodiment, polypeptides, antibodies, polynucleotides and/or agonists or antagonists of the present invention are used as a regulator of antigen presentation by monocytes, dendritic cells, and/or B-cells. In one embodiment, polynucleotides, polypeptides, antibodies, and/or agonists or antagonists of the present invention enhance antigen presentation or antagonizes antigen presentation in vitro or in vivo. Moreover, in related embodiments, said enhancement or antagonism of antigen presentation may be useful as an anti-tumor treatment or to modulate the immune system.

[0532] In another specific embodiment, polypeptides, antibodies, polynucleotides and/or agonists or antagonists of the present invention are used as an agent to direct an individual's immune system towards development of a humoral response (i.e. TH2) as opposed to a THI cellular response.

[0533] In another specific embodiment, polypeptides, antibodies, polynucleotides and/or agonists or antagonists of the present invention are used as a means to induce tumor proliferation and thus make it more susceptible to anti-neoplastic agents. For example, multiple myeloma is a slowly dividing disease and is thus refractory to virtually all anti-neoplastic regimens. If these cells were forced to proliferate more rapidly their susceptibility profile would likely change.

[0534] In another specific embodiment, polypeptides, antibodies, polynucleotides and/or agonists or antagonists of the present invention are used as a stimulator of B cell production in pathologies such as AIDS, chronic lymphocyte disorder and/or Common Variable Immunodificiency.

[0535] In another specific embodiment, polypeptides, antibodies, polynucleotides and/or agonists or antagonists of the present invention are used as a therapy for generation and/or regeneration of lymphoid tissues following surgery, trauma or genetic defect. In another specific embodiment, polypeptides, antibodies, polynucleotides and/or agonists or antagonists of the present invention are used in the pretreatment of bone marrow samples prior to transplant.

[0536] In another specific embodiment, polypeptides, antibodies, polynucleotides and/or agonists or antagonists of the present invention are used as a gene-based therapy for genetically inherited disorders resulting in immuno-incompetence/immunodeficiency such as observed among SCID patients.

[0537] In another specific embodiment, polypeptides, antibodies, polynucleotides and/or agonists or antagonists of the present invention are used as a means of activating monocytes/macrophages to defend against parasitic diseases that effect monocytes such as Leisnmania.

[0538] In another specific embodiment, polypeptides, antibodies, polynucleotides and/or agonists or antagonists of the present invention are used as a means of regulating secreted cytokines that are elicited by polypeptides of the invention.

[0539] In another embodiment, polypeptides, antibodies, polynucleotides and/or agonists or antagonists of the present invention are used in one or more of the applications decribed herein, as they may apply to veterinary medicine.

[0540] In another specific embodiment, polypeptides, antibodies, polynucleotides and/or agonists or antagonists of the present invention are used as a means of blocking various aspects of immune responses to foreign agents or self. Examples of diseases or conditions in which blocking of certain aspects of immune responses may be desired include autoimmune disorders such as lupus, and arthritis, as well as immunoresponsiveness to skin allergies, inflammation, bowel disease, injury and diseases/disorders associated with pathogens.

[0541] In another specific embodiment, polypeptides, antibodies, polynucleotides and/or agonists or antagonists of the present invention are used as a therapy for preventing the B cell proliferation and Ig secretion associated with autoimmune diseases such as idiopathic thrombocytopenic purpura, systemic lupus erythematosus and multiple sclerosis.

[0542] In another specific embodiment, polypeptides, antibodies, polynucleotides and/or agonists or antagonists of the present invention are used as a inhibitor of B and/or T cell migration in endothelial cells. This activity disrupts tissue architecture or cognate responses and is useful, for example in disrupting immune responses, and blocking sepsis.

[0543] In another specific embodiment, polypeptides, antibodies, polynucleotides and/or agonists or antagonists of the present invention are used as a therapy for chronic hypergammaglobulinemia evident in such diseases as monoclonal gammopathy of undetermined significance (MGUS), Waldenstrom's disease, related idiopathic monoclonal gammopathies, and plasmacytomas.

[0544] In another specific embodiment, polypeptides, antibodies, polynucleotides and/or agonists or antagonists of the present invention may be employed for instance to inhibit polypeptide chemotaxis and activation of macrophages and their precursors, and of neutrophils, basophils, B lymphocytes and some T-cell subsets, e.g., activated and CD8 cytotoxic T cells and natural killer cells, in certain autoimmune and chronic inflammatory and infective diseases. Examples of autoimmune diseases are described herein and include multiple sclerosis, and insulin-dependent diabetes.

[0545] The polypeptides, antibodies, polynucleotides and/or agonists or antagonists of the present invention may also be employed to treat idiopathic hyper-eosinophilic syndrome by, for example, preventing eosinophil production and migration.

[0546] In another specific embodiment, polypeptides, antibodies, polynucleotides and/or agonists or antagonists of the present invention are used to enhance or inhibit complement mediated cell lysis.

[0547] In another specific embodiment, polypeptides, antibodies, polynucleotides and/or agonists or antagonists of the present invention are used to enhance or inhibit antibody dependent cellular cytotoxicity.

[0548] In another specific embodiment, polypeptides, antibodies, polynucleotides and/or agonists or antagonists of the present invention may also be employed for treating atherosclerosis, for example, by preventing monocyte infiltration in the artery wall.

[0549] In another specific embodiment, polypeptides, antibodies, polynucleotides and/or agonists or antagonists of the present invention may be employed to treat adult respiratory distress syndrome (ARDS).

[0550] In another specific embodiment, polypeptides, antibodies, polynucleotides and/or agonists or antagonists of the present invention may be useful for stimulating wound and tissue repair, stimulating angiogenesis, and/or stimulating the repair of vascular or lymphatic diseases or disorders. Additionally, agonists and antagonists of the invention may be used to stimulate the regeneration of mucosal surfaces.

[0551] In a specific embodiment, polynucleotides or polypeptides, and/or agonists thereof are used to diagnose, prognose, treat, and/or prevent a disorder characterized by primary or acquired immunodeficiency, deficient serum immunoglobulin production, recurrent infections, and/or immune system dysfunction. Moreover, polynucleotides or polypeptides, and/or agonists thereof may be used to treat or prevent infections of the joints, bones, skin, and/or parotid glands, blood-borne infections (e.g., sepsis, meningitis, septic arthritis, and/or osteomyelitis), autoimmune diseases (e.g., those disclosed herein), inflammatory disorders, and malignancies, and/or any disease or disorder or condition associated with these infections, diseases, disorders and/or malignancies) including, but not limited to, CVID, other primary immune deficiencies, HIV disease, CLL, recurrent bronchitis, sinusitis, otitis media, conjunctivitis, pneumonia, hepatitis, meningitis, herpes zoster (e.g., severe herpes zoster), and/or pneumocystis carnii. Other diseases and disorders that may be prevented, diagnosed, prognosed, and/or treated with polynucleotides or polypeptides, and/or agonists of the present invention include, but are not limited to, HIV infection, HTLV-BLV infection, lymphopenia, phagocyte bactericidal dysfunction anemia, thrombocytopenia, and hemoglobinuria.

[0552] In another embodiment, polynucleotides, polypeptides, antibodies, and/or agonists or antagonists of the present invention are used to treat, and/or diagnose an individual having common variable immunodeficiency disease (“CVID”; also known as “acquired agammaglobulinemia” and “acquired hypogammaglobulinemia”) or a subset of this disease.

[0553] In a specific embodiment, polynucleotides, polypeptides, antibodies, and/or agonists or antagonists of the present invention may be used to diagnose, prognose, prevent, and/or treat cancers or neoplasms including immune cell or immune tissue-related cancers or neoplasms. Examples of cancers or neoplasms that may be prevented, diagnosed, or treated by polynucleotides, polypeptides, antibodies, and/or agonists or antagonists of the present invention include, but are not limited to, acute myelogenous leukemia, chronic myelogenous leukemia, Hodgkin's disease, non-Hodgkin's lymphoma, acute lymphocytic anemia (ALL) Chronic lymphocyte leukemia, plasmacytomas, multiple myeloma, Burkitt's lymphoma, EBV-transformed diseases, and/or diseases and disorders described in the section entitled “Hyperproliferative Disorders” elsewhere herein.

[0554] In another specific embodiment, polypeptides, antibodies, polynucleotides and/or agonists or antagonists of the present invention are used as a therapy for decreasing cellular proliferation of Large B-cell Lymphomas.

[0555] In another specific embodiment, polypeptides, antibodies, polynucleotides and/or agonists or antagonists of the present invention are used as a means of decreasing the involvement of B cells and Ig associated with Chronic Myelogenous Leukemia.

[0556] In specific embodiments, the compositions of the invention are used as an agent to boost immunoresponsiveness among B cell immunodeficient individuals, such as, for example, an individual who has undergone a partial or complete splenectomy.

[0557] Antagonists of the invention include, for example, binding and/or inhibitory antibodies, antisense nucleic acids, ribozymes or soluble forms of the polypeptides of the present invention (e.g., Fc fusion protein; see, e.g., Example 9). Agonists of the invention include, for example, binding or stimulatory antibodies, and soluble forms of the polypeptides (e.g., Fc fusion proteins; see, e.g., Example 9). polypeptides, antibodies, polynucleotides and/or agonists or antagonists of the present invention may be employed in a composition with a pharmaceutically acceptable carrier, e.g., as described herein.

[0558] In another embodiment, polypeptides, antibodies, polynucleotides and/or agonists or antagonists of the present invention are administered to an animal (including, but not limited to, those listed above, and also including transgenic animals) incapable of producing functional endogenous antibody molecules or having an otherwise compromised endogenous immune system, but which is capable of producing human immunoglobulin molecules by means of a reconstituted or partially reconstituted immune system from another animal (see, e.g., published PCT Application Nos. WO98/24893, WO/9634096, WO/9633735, and WO/9110741). Administration of polypeptides, antibodies, polynucleotides and/or agonists or antagonists of the present invention to such animals is useful for the generation of monoclonal antibodies against the polypeptides, antibodies, polynucleotides and/or agonists or antagonists of the present invention.

[0559] Blood-related Disorders

[0560] The polynucleotides, polypeptides, antibodies, and/or agonists or antagonists of the present invention may be used to modulate hemostatic (the stopping of bleeding) or thrombolytic (clot dissolving) activity. For example, by increasing hemostatic or thrombolytic activity, polynucleotides or polypeptides, and/or agonists or antagonists of the present invention could be used to treat or prevent blood coagulation diseases, disorders, and/or conditions (e.g., afibrinogenemia, factor deficiencies, hemophilia), blood platelet diseases, disorders, and/or conditions (e.g., thrombocytopenia), or wounds resulting from trauma, surgery, or other causes. Alternatively, polynucleotides, polypeptides, antibodies, and/or agonists or antagonists of the present invention that can decrease hemostatic or thrombolytic activity could be used to inhibit or dissolve clotting. These molecules could be important in the treatment or prevention of heart attacks (infarction), strokes, or scarring.

[0561] In specific embodiments, the polynucleotides, polypeptides, antibodies, and/or agonists or antagonists of the present invention may be used to prevent, diagnose, prognose, and/or treat thrombosis, arterial thrombosis, venous thrombosis, thromboembolism, pulmonary embolism, atherosclerosis, myocardial infarction, transient ischemic attack, unstable angina. In specific embodiments, the polynucleotides, polypeptides, antibodies, and/or agonists or antagonists of the present invention may be used for the prevention of occulsion of saphenous grafts, for reducing the risk of periprocedural thrombosis as might accompany angioplasty procedures, for reducing the risk of stroke in patients with atrial fibrillation including nonrheumatic atrial fibrillation, for reducing the risk of embolism associated with mechanical heart valves and or mitral valves disease. Other uses for the polynucleotides, polypeptides, antibodies, and/or agonists or antagonists of the present invention, include, but are not limited to, the prevention of occlusions in extrcorporeal devices (e.g., intravascular canulas, vascular access shunts in hemodialysis patients, hemodialysis machines, and cardiopulmonary bypass machines).

[0562] In another embodiment, a polypeptide of the invention, or polynucleotides, antibodies, agonists, or antagonists corresponding to that polypeptide, may be used to prevent, diagnose, prognose, and/or treat diseases and disorders of the blood and/or blood forming organs associated with the tissue(s) in which the polypeptide of the invention is expressed, including one, two, three, four, five, or more tissues disclosed in Table 1A, column 8 (Tissue Distribution Library Code).

[0563] The polynucleotides, polypeptides, antibodies, and/or agonists or antagonists of the present invention may be used to modulate hematopoietic activity (the formation of blood cells). For example, the polynucleotides, polypeptides, antibodies, and/or agonists or antagonists of the present invention may be used to increase the quantity of all or subsets of blood cells, such as, for example, erythrocytes, lymphocytes (B or T cells), mycloid cells (e.g., basophils, eosinophils, neutrophils, mast cells, macrophages) and platelets. The ability to decrease the quantity of blood cells or subsets of blood cells may be useful in the prevention, detection, diagnosis and/or treatment of anemias and leukopenias described below. Alternatively, the polynucleotides, polypeptides, antibodies, and/or agonists or antagonists of the present invention may be used to decrease the quantity of all or subsets of blood cells, such as, for example, erythrocytes, lymphocytes (B or T cells), myeloid cells (e.g., basophils, eosinophils, neutrophils, mast cells, macrophages) and platelets. The ability to decrease the quantity of blood cells or subsets of blood cells may be useful in the prevention, detection, diagnosis and/or treatment of leukocytoses, such as, for example eosinophilia.

[0564] The polynucleotides, polypeptides, antibodies, and/or agonists or antagonists of the present invention may be used to prevent, treat, or diagnose blood dyscrasia.

[0565] Anemias are conditions in which the number of red blood cells or amount of hemoglobin (the protein that carries oxygen) in them is below normal. Anemia may be caused by excessive bleeding, decreased red blood cell production, or increased red blood cell destruction (hemolysis). The polynucleotides, polypeptides, antibodies, and/or agonists or antagonists of the present invention may be useful in treating, preventing, and/or diagnosing anemias. Anemias that may be treated prevented or diagnosed by the polynucleotides, polypeptides, antibodies, and/or agonists or antagonists of the present invention include iron deficiency anemia, hypochromic anemia, microcytic anemia, chlorosis, hereditary siderob;astic anemia, idiopathic acquired sideroblastic anemia, red cell aplasia, megaloblastic anemia (e.g., pernicious anemia, (vitamin B12 deficiency) and folic acid deficiency anemia), aplastic anemia, hemolytic anemias (e.g., autoimmune helolytic anemia, microangiopathic hemolytic anemia, and paroxysmal nocturnal hemoglobinuria). The polynucleotides, polypeptides, antibodies, and/or agonists or antagonists of the present invention may be useful in treating, preventing, and/or diagnosing anemias associated with diseases including but not limited to, anemias associated with systemic lupus erythematosus, cancers, lymphomas, chronic renal disease, and enlarged spleens. The polynucleotides, polypeptides, antibodies, and/or agonists or antagonists of the present invention may be useful in treating, preventing, and/or diagnosing anemias arising from drug treatments such as anemias associated with methyldopa, dapsone, and/or sulfadrugs. Additionally, rhe polynucleotides, polypeptides, antibodies, and/or agonists or antagonists of the present invention may be useful in treating, preventing, and/or diagnosing anemias associated with abnormal red blood cell architecture including but not limited to, hereditary spherocytosis, hereditary elliptocytosis, glucose-6-phosphate dehydrogenase deficiency, and sickle cell anemia.

[0566] The polynucleotides,. polypeptides, antibodies, and/or agonists or antagonists of the present invention may be useful in treating, preventing, and/or diagnosing hemoglobin abnormalities, (e.g., those associated with sickle cell anemia, hemoglobin C disease, hemoglobin S-C disease, and hemoglobin E disease). Additionally, the polynucleotides, polypeptides, antibodies, and/or agonists or antagonists of the present invention may be useful in diagnosing, prognosing, preventing, and/or treating thalassemias, including, but not limited to major and minor forms of alpha-thalassemia and beta-thalassemia.

[0567] In another embodiment, the polynucleotides, polypeptides, antibodies, and/or agonists or antagonists of the present invention may be useful in diagnosing, prognosing, preventing, and/or treating bleeding disorders including, but not limited to, thrombocytopenia (e.g., idiopathic thrombocytopenic purpura, and thrombotic thrombocytopenic purpura), Von Willebrand's disease, hereditary platelet disorders (e.g., storage pool disease such as Chediak-Higashi and Hermansky-Pudlak syndromes, thromboxane A2 dysfunction, thromboasthenia, and Bemard-Soulier syndrome), hemolytic-uremic syndrome, hemophelias such as hemophelia A or Factor VII deficiency and Christmas disease or Factor IX deficiency, Hereditary Hemorhhagic Telangiectsia, also known as Rendu-Osler-Weber syndrome, allergic purpura (Henoch Schonlein purpura) and disseminated intravascular coagulation.

[0568] The effect of the polynucleotides, polypeptides, antibodies, and/or agonists or antagonists of the present invention on the clotting time of blood may be monitored using any of the clotting tests known in the art including, but not limited to, whole blood partial thromboplastin time (PTT), the activated partial thromboplastin time (aPTT), the activated clotting time (ACT), the recalcified activated clotting time, or the Lee-White Clotting time.

[0569] Several diseases and a variety of drugs can cause platelet dysfunction. Thus, in a specific embodiment, the polynucleotides, polypeptides, antibodies, and/or agonists or antagonists of the present invention may be useful in diagnosing, prognosing, preventing, and/or treating acquired platelet dysfunction such as platelet dysfunction accompanying kidney failure, leukemia, multiple myeloma, cirrhosis of the liver, and systemic lupus erythematosus as well as platelet dysfunction associated with drug treatments, including treatment with aspirin, ticlopidine, nonsteroidal anti-inflammatory drugs (used for arthritis, pain, and sprains), and penicillin in high doses.

[0570] In another embodiment, the polynucleotides, polypeptides, antibodies, and/or agonists or antagonists of the present invention may be useful in diagnosing, prognosing, preventing, and/or treating diseases and disorders characterized by or associated with increased or decreased numbers of white blood cells. Leukopenia occurs when the number of white blood cells decreases below normal. Leukopenias include, but are not limited to, neutropenia and lymphocytopenia. An increase in the number of white blood cells compared to normal is known as leukocytosis. The body generates increased numbers of white blood cells during infection. Thus, leukocytosis may simply be a normal physiological parameter that reflects infection. Alternatively, leukocytosis may be an indicator of injury or other disease such as cancer. Leokocytoses, include but are not limited to, eosinophilia, and accumulations of macrophages. In specific embodiments, the polynucleotides, polypeptides, antibodies, and/or agonists or antagonists of the present invention may be useful in diagnosing, prognosing, preventing, and/or treating leukopenia. In other specific embodiments, the polynucleotides, polypeptides, antibodies, and/or agonists or antagonists of the present invention may be useful in diagnosing, prognosing, preventing, and/or treating leukocytosis.

[0571] Leukopenia may be a generalized decreased in all types of white blood cells, or may be a specific depletion of particular types of white blood cells. Thus, in specific embodiments, the polynucleotides, polypeptides, antibodies, and/or agonists or antagonists of the present invention may be useful in diagnosing, prognosing, preventing, and/or treating decreases in neutrophil numbers, known as neutropenia. Neutropenias that may be diagnosed, prognosed, prevented, and/or treated by the polynucleotides, polypeptides, antibodies, and/or agonists or antagonists of the present invention include, but are not limited to, infantile genetic agranulocytosis, familial neutropenia, cyclic neutropenia, neutropenias resulting from or associated with dietary deficiencies (e.g., vitamin B 12 deficiency or folic acid deficiency), neutropenias resulting from or associated with drug treatments (e.g., antibiotic regimens such as penicillin treatment, sulfonamide treatment, anticoagulant treatment, anticonvulsant drugs, anti-thyroid drugs, and cancer chemotherapy), and neutropenias resulting from increased neutrophil destruction that may occur in association with some bacterial or viral infections, allergic disorders, autoimmune diseases, conditions in which an individual has an enlarged spleen (e.g., Felty syndrome, malaria and sarcoidosis), and some drug treatment regimens.

[0572] The polynucleotides, polypeptides, antibodies, and/or agonists or antagonists of the present invention may be useful in diagnosing, prognosing, preventing, and/or treating lymphocytopenias (decreased numbers of B and/or T lymphocytes), including, but not limited lymphocytopenias resulting from or associated with stress, drug treatments (e.g., drug treatment with corticosteroids, cancer chemotherapies, and/or radiation therapies), AIDS infection and/or other diseases such as, for example, cancer, rheumatoid arthritis, systemic lupus erythematosus, chronic infections, some viral infections and/or hereditary disorders (e.g., DiGeorge syndrome, Wiskott-Aldrich Syndome, severe combined immunodeficiency, ataxia telangiectsia).

[0573] The polynucleotides, polypeptides, antibodies, and/or agonists or antagonists of the present invention may be useful in diagnosing, prognosing, preventing, and/or treating diseases and disorders associated with macrophage numbers and/or macrophage function including, but not limited to, Gaucher's disease, Niemann-Pick disease, Letterer-Siwe disease and Hand-Schuller-Christian disease.

[0574] In another embodiment, the polynucleotides, polypeptides, antibodies, and/or agonists or antagonists of the present invention may be useful in diagnosing, prognosing, preventing, and/or treating diseases and disorders associated with eosinophil numbers and/or eosinophil function including, but not limited to, idiopathic hypereosinophilic syndrome, eosinophilia-myalgia syndrome, and Hand-Schuller-Christian disease.

[0575] In yet another embodiment, the polynucleotides, polypeptides, antibodies, and/or agonists or antagonists of the present invention may be useful in diagnosing, prognosing, preventing, and/or treating leukemias and lymphomas including, but not limited to, acute lymphocytic (lymphpblastic) leukemia (ALL), acute myeloid (myelocytic, myelogenous, myeloblastic, or myelomonocytic) leukemia, chronic lymphocytic leukemia (e.g., B cell leukemias, T cell leukemias, Sezary syndrome, and Hairy cell leukenia), chronic myelocytic (myeloid, myelogenous, or granulocytic) leukemia, Hodgkin's lymphoma, non-hodgkin's lymphoma, Burkitt's lymphoma, and mycosis fungoides.

[0576] In other embodiments, the polynucleotides, polypeptides, antibodies, and/or agonists or antagonists of the present invention may be useful in diagnosing, prognosing, preventing, and/or treating diseases and disorders of plasma cells including, but not limited to, plasma cell dyscrasias, monoclonal gammaopathies, monoclonal gammopathies of undetermined significance, multiple myeloma, macroglobulinemia, Waldenstrom's macroglobulinemia, cryoglobulinemia, and Raynaud's phenomenon.

[0577] In other embodiments, the polynucleotides, polypeptides, antibodies, and/or agonists or antagonists of the present invention may be useful in treating, preventing, and/or diagnosing myeloproliferative disorders, including but not limited to, polycythemia vera, relative polycythemia, secondary polycythemia, myelofibrosis, acute myelofibrosis, agnogenic myelod metaplasia, thrombocythemia, (including both primary and seconday thrombocythemia) and chronic myelocytic leukemia.

[0578] In other embodiments, the polynucleotides, polypeptides, antibodies, and/or agonists or antagonists of the present invention may be useful as a treatment prior to surgery, to increase blood cell production.

[0579] In other embodiments, the polynucleotides, polypeptides, antibodies, and/or agonists or antagonists of the present invention may be useful as an agent to enhance the migration, phagocytosis, superoxide production, antibody dependent cellular cytotoxicity of neutrophils, eosionophils and macrophages.

[0580] In other embodiments, the polynucleotides, polypeptides, antibodies, and/or agonists or antagonists of the present invention may be useful as an agent to increase the number of stem cells in circulation prior to stem cells pheresis. In another specific embodiment, the polynucleotides, polypeptides, antibodies, and/or agonists or antagonists of the present invention may be useful as an agent to increase the number of stem cells in circulation prior to platelet pheresis.

[0581] In other embodiments, the polynucleotides, polypeptides, antibodies, and/or agonists or antagonists of the present invention may be useful as an agent to increase cytokine production.

[0582] In other embodiments, the polynucleotides, polypeptides, antibodies, and/or agonists or antagonists of the present invention may be useful in preventing, diagnosing, and/or treating primary hematopoietic disorders.

[0583] Hyperproliferative Disorders

[0584] In certain embodiments, polynucleotides or polypeptides, or agonists or antagonists of the present invention can be used to treat or detect hyperproliferative disorders, including neoplasms. Polynucleotides or polypeptides, or agonists or antagonists of the present invention may inhibit the proliferation of the disorder through direct or indirect interactions. Alternatively, Polynucleotides or polypeptides, or agonists or antagonists of the present invention may proliferate other cells which can inhibit the hyperproliferative disorder.

[0585] For example, by increasing an immune response, particularly increasing antigenic qualities of the hyperproliferative disorder or by proliferating, differentiating, or mobilizing T-cells, hyperproliferative disorders can be treated. This immune response may be increased by either enhancing an existing immune response, or by initiating a new immune response. Alternatively, decreasing an immune response may also be a method of treating hyperproliferative disorders, such as a chemotherapeutic agent.

[0586] Examples of hyperproliferative disorders that can be treated or detected by polynucleotides or polypeptides, or agonists or antagonists of the present invention include, but are not limited to neoplasms located in the: colon, abdomen, bone, breast, digestive system, liver, pancreas, peritoneum, endocrine glands (adrenal, parathyroid, pituitary, testicles, ovary, thymus, thyroid), eye, head and neck, nervous (central and peripheral), lymphatic system, pelvis, skin, soft tissue, spleen, thorax, and urogenital tract.

[0587] Similarly, other hyperproliferative disorders can also be treated or detected by polynucleotides or polypeptides, or agonists or antagonists of the present invention. Examples of such hyperproliferative disorders include, but are not limited to: Acute Childhood Lymphoblastic Leukemia, Acute Lymphoblastic Leukemia, Acute Lymphocytic Leukemia, Acute Myeloid Leukemia, Adrenocortical Carcinoma, Adult (Primary) Hepatocellular Cancer, Adult (Primary) Liver Cancer, Adult Acute Lymphocytic Leukemia, Adult Acute Myeloid Leukemia, Adult Hodgkin's Disease, Adult Hodgkin's Lymphoma, Adult Lymphocytic Leukemia, Adult Non-Hodgkin's Lymphoma, Adult Primary Liver Cancer, Adult Soft Tissue Sarcoma, AIDS-Related Lymphoma, AIDS-Related Malignancies, Anal Cancer, Astrocytoma, Bile Duct Cancer, Bladder Cancer, Bone Cancer, Brain Stem Glioma, Brain Tumors, Breast Cancer, Cancer of the Renal Pelvis and Ureter, Central Nervous System (Primary) Lymphoma, Central Nervous System Lymphoma, Cerebellar Astrocytoma, Cerebral Astrocytoma, Cervical Cancer, Childhood (Primary) Hepatocellular Cancer, Childhood (Primary) Liver Cancer, Childhood Acute Lymphoblastic Leukemia, Childhood Acute Myeloid Leukemia, Childhood Brain Stem Glioma, Childhood Cerebellar Astrocytoma, Childhood Cerebral Astrocytoma, Childhood Extracranial Germ Cell Tumors, Childhood Hodgkin's Disease, Childhood Hodgkin's Lymphoma, Childhood Hypothalamic and Visual Pathway Glioma, Childhood Lymphoblastic Leukemia, Childhood Medulloblastoma, Childhood Non-Hodgkin's Lymphoma, Childhood Pineal and Supratentorial Primitive Neuroectodermal Tumors, Childhood Primary Liver Cancer, Childhood Rhabdomyosarcoma, Childhood Soft Tissue Sarcoma, Childhood Visual Pathway and Hypothalamic Glioma, Chronic Lymphocytic Leukemia, Chronic Myelogenous Leukemia, Colon Cancer, Cutaneous T-Cell Lymphoma, Endocrine Pancreas Islet Cell Carcinoma, Endometrial Cancer, Ependymoma, Epithelial Cancer, Esophageal Cancer, Ewing's Sarcoma and Related Tumors, Exocrine Pancreatic Cancer, Extracranial Germ Cell Tumor, Extragonadal Germ Cell Tumor, Extrahepatic Bile Duct Cancer, Eye Cancer, Female Breast Cancer, Gaucher's Disease, Gallbladder Cancer, Gastric Cancer, Gastrointestinal Carcinoid Tumor, Gastrointestinal Tumors, Germ Cell Tumors, Gestational Trophoblastic Tumor, Hairy Cell Leukemia, Head and Neck Cancer, Hepatocellular Cancer, Hodgkin's Disease, Hodgkin's Lymphoma, Hypergammaglobulinemia, Hypopharyngeal Cancer, Intestinal Cancers, Intraocular Melanoma, Islet Cell Carcinoma, Islet Cell Pancreatic Cancer, Kaposi's Sarcoma, Kidney Cancer, Laryngeal Cancer, Lip and Oral Cavity Cancer, Liver Cancer, Lung Cancer, Lymphoproliferative Disorders, Macroglobulinemia, Male Breast Cancer, Malignant Mesothelioma, Malignant Thymoma, Medulloblastoma, Melanoma, Mesothelioma, Metastatic Occult Primary Squamous Neck Cancer, Metastatic Primary Squamous Neck Cancer, Metastatic Squamous Neck Cancer, Multiple Myeloma, Multiple Myeloma/Plasma Cell Neoplasm, Myelodysplastic Syndrome, Myelogenous Leukemia, Myeloid Leukemia, Myeloproliferative Disorders, Nasal Cavity and Paranasal Sinus Cancer, Nasopharyngeal Cancer, Neuroblastoma, Non-Hodgkin's Lymphoma During Pregnancy, Nonmelanoma Skin Cancer, Non-Small Cell Lung Cancer, Occult Primary Metastatic Squamous Neck Cancer, Oropharyngeal Cancer, Osteo-/Malignant Fibrous Sarcoma, Osteosarcoma/Malignant Fibrous Histiocytoma, Osteosarcoma/Malignant Fibrous Histiocytoma of Bone, Ovarian Epithelial Cancer, Ovarian Germ Cell Tumor, Ovarian Low Malignant Potential Tumor, Pancreatic Cancer, Paraproteinemias, Purpura, Parathyroid Cancer, Penile Cancer, Pheochromocytoma, Pituitary Tumor, Plasma Cell Neoplasm/Multiple Myeloma, Primary Central Nervous System Lymphoma, Primary Liver Cancer, Prostate Cancer, Rectal Cancer, Renal Cell Cancer, Renal Pelvis and Ureter Cancer, Retinoblastoma, Rhabdomyosarcoma, Salivary Gland Cancer, Sarcoidosis Sarcomas, Sezary Syndrome, Skin Cancer, Small Cell Lung Cancer, Small Intestine Cancer, Soft Tissue Sarcoma, Squamous Neck Cancer, Stomach Cancer, Supratentorial Primitive Neuroectodermal and Pineal Tumors, T-Cell Lymphoma, Testicular Cancer, Thymoma, Thyroid Cancer, Transitional Cell Cancer of the Renal Pelvis and Ureter, Transitional Renal Pelvis and Ureter Cancer, Trophoblastic Tumors, Ureter and Renal Pelvis Cell Cancer, Urethral Cancer, Uterine Cancer, Uterine Sarcoma, Vaginal Cancer, Visual Pathway and Hypothalamic Glioma, Vulvar Cancer, Waldenstrom's Macroglobulinemia, Wilms' Tumor, and any other hyperproliferative disease, besides neoplasia, located in an organ system listed above.

[0588] In another preferred embodiment, polynucleotides or polypeptides, or agonists or antagonists of the present invention are used to diagnose, prognose, prevent, and/or treat premalignant conditions and to prevent progression to a neoplastic or malignant state, including but not limited to those disorders described above. Such uses are indicated in conditions known or suspected of preceding progression to neoplasia or cancer, in particular, where non-neoplastic cell growth consisting of hyperplasia, metaplasia, or most particularly, dysplasia has occurred (for review of such abnormal growth conditions, see Robbins and Angell, 1976, Basic Pathology, 2d Ed., W. B. Saunders Co., Philadelphia, pp. 68-79.)

[0589] Hyperplasia is a form of controlled cell proliferation, involving an increase in cell number in a tissue or organ, without significant alteration in structure or function. Hyperplastic disorders which can be diagnosed, prognosed, prevented, and/or treated with compositions of the invention (including polynucleotides, polypeptides, agonists or antagonists) include, but are not limited to, angiofollicular mediastinal lymph node hyperplasia, angiolymphoid hyperplasia with eosinophilia, atypical melanocytic hyperplasia, basal cell hyperplasia, benign giant lymph node hyperplasia, cementum hyperplasia, congenital adrenal hyperplasia, congenital sebaceous hyperplasia, cystic hyperplasia, cystic hyperplasia of the breast, denture hyperplasia, ductal hyperplasia, endometrial hyperplasia, fibromuscular hyperplasia, focal epithelial hyperplasia, gingival hyperplasia, inflammatory fibrous hyperplasia, inflammatory papillary hyperplasia, intravascular papillary endothelial hyperplasia, nodular hyperplasia of prostate, nodular regenerative hyperplasia, pseudoepitheliomatous hyperplasia, senile sebaceous hyperplasia, and verrucous hyperplasia.

[0590] Metaplasia is a form of controlled cell growth in which one type of adult or fully differentiated cell substitutes for another type of adult cell. Metaplastic disorders which can be diagnosed, prognosed, prevented, and/or treated with compositions of the invention (including polynucleotides, polypeptides, agonists or antagonists) include, but are not limited to, agnogenic myeloid metaplasia, apocrine metaplasia, atypical metaplasia, autoparenchymatous metaplasia, connective tissue metaplasia, epithelial metaplasia, intestinal metaplasia, metaplastic anemia, metaplastic ossification, metaplastic polyps, myeloid metaplasia, primary myeloid metaplasia, secondary myeloid metaplasia, squamous metaplasia, squamous metaplasia of amnion, and symptomatic myeloid metaplasia.

[0591] Dysplasia is frequently a forerunner of cancer, and is found mainly in the epithelia; it is the most disorderly form of non-neoplastic cell growth, involving a loss in individual cell uniformity and in the architectural orientation of cells. Dysplastic cells often have abnormally large, deeply stained nuclei, and exhibit pleomorphism. Dysplasia characteristically occurs where there exists chronic irritation or inflammation. Dysplastic disorders which can be diagnosed, prognosed, prevented, and/or treated with compositions of the invention (including polynucleotides, polypeptides, agonists or antagonists) include, but are not limited to, anhidrotic ectodermal dysplasia, anterofacial dysplasia, asphyxiating thoracic dysplasia, atriodigital dysplasia, bronchopulmonary dysplasia, cerebral dysplasia, cervical dysplasia, chondroectodermal dysplasia, cleidocranial dysplasia, congenital ectodermal dysplasia, craniodiaphysial dysplasia, craniocarpotarsal dysplasia, craniometaphysial dysplasia, dentin dysplasia, diaphysial dysplasia, ectodermal dysplasia, enamel dysplasia, encephaloophthalmic dysplasia, dysplasia epiphysialis hemimelia, dysplasia epiphysialis multiplex, dysplasia epiphysialis punctata, epithelial dysplasia, faciodigitogenital dysplasia, familial fibrous dysplasia of jaws, familial white folded dysplasia, fibromuscular dysplasia, fibrous dysplasia of bone, florid osseous dysplasia, hereditary renal-retinal dysplasia, hidrotic ectodermal dysplasia, hypohidrotic ectodermal dysplasia, lymphopenic thymic dysplasia, mammary dysplasia, mandibulofacial dysplasia, metaphysial dysplasia, Mondini dysplasia, monostotic fibrous dysplasia, mucoepithelial dysplasia, multiple epiphysial dysplasia, oculoauriculovertebral dysplasia, oculodentodigital dysplasia, oculovertebral dysplasia, odontogenic dysplasia, ophthalmomandibulomelic dysplasia, periapical cemental dysplasia, polyostotic fibrous dysplasia, pseudoachondroplastic spondyloepiphysial dysplasia, retinal dysplasia, septo-optic dysplasia, spondyloepiphysial dysplasia, and ventriculoradial dysplasia.

[0592] Additional pre-neoplastic disorders which can be diagnosed, prognosed, prevented, and/or treated with compositions of the invention (including polynucleotides, polypeptides, agonists or antagonists) include, but are not limited to, benign dysproliferative disorders (e.g., benign tumors, fibrocystic conditions, tissue hypertrophy, intestinal polyps, colon polyps, and esophageal dysplasia), leukoplakia, keratoses, Bowen's disease, Farmer's Skin, solar cheilitis, and solar keratosis.

[0593] In another embodiment, a polypeptide of the invention, or polynucleotides, antibodies, agonists, or antagonists corresponding to that polypeptide, may be used to diagnose and/or prognose disorders associated with the tissue(s) in which the polypeptide of the invention is expressed, including one, two, three, four, five, or more tissues disclosed in Table 1A, column 8 (Tissue Distribution Library Code).

[0594] In another embodiment, polynucleotides, polypeptides, antibodies, and/or agonists or antagonists of the present invention conjugated to a toxin or a radioactive isotope, as described herein, may be used to treat cancers and neoplasms, including, but not limited to those described herein. In a further preferred embodiment, polynucleotides, polypeptides, antibodies, and/or agonists or antagonists of the present invention conjugated to a toxin or a radioactive isotope, as described herein, may be used to treat acute myelogenous leukemia.

[0595] Additionally, polynucleotides, polypeptides, and/or agonists or antagonists of the invention may affect apoptosis, and therefore, would be useful in treating a number of diseases associated with increased cell survival or the inhibition of apoptosis. For example, diseases associated with increased cell survival or the inhibition of apoptosis that could be diagnosed, prognosed, prevented, and/or treated by polynucleotides, polypeptides, and/or agonists or antagonists of the invention, include cancers (such as follicular lymphomas, carcinomas with p53 mutations, and hormone-dependent tumors, including, but not limited to colon cancer, cardiac tumors, pancreatic cancer, melanoma, retinoblastoma, glioblastoma, lung cancer, intestinal cancer, testicular cancer, stomach cancer, neuroblastoma, myxoma, myoma, lymphoma, endothelioma, osteoblastoma, osteoclastoma, osteosarcoma, chondrosarcoma, adenoma, breast cancer, prostate cancer, Kaposi's sarcoma and ovarian cancer); autoimmune disorders such as, multiple sclerosis, Sjogren's syndrome, Hashimoto's thyroiditis, biliary cirrhosis, Behcet's disease, Crohn's disease, polymyositis, systemic lupus erythematosus and immune-related glomerulonephritis and rheumatoid arthritis) and viral infections (such as herpes viruses, pox viruses and adenoviruses), inflammation, graft v. host disease, acute graft rejection, and chronic graft rejection.

[0596] In preferred embodiments, polynucleotides, polypeptides, and/or agonists or antagonists of the invention are used to inhibit growth, progression, and/or metastasis of cancers, in particular those listed above.

[0597] Additional diseases or conditions associated with increased cell survival that could be diagnosed, prognosed, prevented, and/or treated by polynucleotides, polypeptides, and/or agonists or antagonists of the invention, include, but are not limited to, progression, and/or metastases of malignancies and related disorders such as leukemia (including acute leukemias (e.g., acute lymphocytic leukemia, acute myelocytic leukemia (including myeloblastic, promyelocytic, myelomonocytic, monocytic, and erythroleukemia)) and chronic leukemias (e.g., chronic myelocytic (granulocytic) leukemia and chronic lymphocytic leukemia)), polycythemia vera, lymphomas (e.g., Hodgkin's disease and non-Hodgkin's disease), multiple myeloma, Waldenstrom's macroglobulinemia, heavy chain disease, and solid tumors including, but not limited to, sarcomas and carcinomas such as fibrosarcoma, myxosarcoma, liposarcoma, chondrosarcoma, osteogenic sarcoma, chordoma, angiosarcoma, endotheliosarcoma, lymphangiosarcoma, lymphangioendotheliosarcoma, synovioma, mesothelioma, Ewing's tumor, leiomyosarcoma, rhabdomyosarcoma, colon carcinoma, pancreatic cancer, breast cancer, ovarian cancer, prostate cancer, squamous cell carcinoma, basal cell carcinoma, adenocarcinoma, sweat gland carcinoma, sebaceous gland carcinoma, papillary carcinoma, papillary adenocarcinomas, cystadenocarcinoma, medullary carcinoma, bronchogenic carcinoma, renal cell carcinoma, hepatoma, bile duct carcinoma, choriocarcinoma, seminoma, embryonal carcinoma, Wilm's tumor, cervical cancer, testicular tumor, lung carcinoma, small cell lung carcinoma, bladder carcinoma, epithelial carcinoma, glioma, astrocytoma, medulloblastoma, craniopharyngioma, ependymoma, pinealoma, emangioblastoma, acoustic neuroma, oligodendroglioma, menangioma, melanoma, neuroblastoma, and retinoblastoma.

[0598] Diseases associated with increased apoptosis that could be diagnosed, prognosed, prevented, and/or treated by polynucleotides, polypeptides, and/or agonists or antagonists of the invention, include AIDS; neurodegenerative disorders (such as Alzheimer's disease, Parkinson's disease, amyotrophic lateral sclerosis, retinitis pigmentosa, cerebellar degeneration and brain tumor or prior associated disease); autoimmune disorders (such as, multiple sclerosis, Sjogren's syndrome, Hashimoto's thyroiditis, biliary cirrhosis, Behcet's disease, Crohn's disease, polymyositis, systemic lupus erythematosus and immune-related glomerulonephritis and rheumatoid arthritis) myelodysplastic syndromes (such as aplastic anemia), graft v. host disease, ischemic injury (such as that caused by myocardial infarction, stroke and reperfusion injury), liver injury (e.g., hepatitis related liver injury, ischemia/reperfusion injury, cholestosis (bile duct injury) and liver cancer); toxin-induced liver disease (such as that caused by alcohol), septic shock, cachexia and anorexia.

[0599] Hyperproliferative diseases and/or disorders that could be diagnosed, prognosed, prevented, and/or treated by polynucleotides, polypeptides, and/or agonists or antagonists of the invention, include, but are not limited to, neoplasms located in the liver, abdomen, bone, breast, digestive system, pancreas, peritoneum, endocrine glands (adrenal, parathyroid, pituitary, testicles, ovary, thymus, thyroid), eye, head and neck, nervous system (central and peripheral), lymphatic system, pelvis, skin, soft tissue, spleen, thorax, and urogenital tract.

[0600] Similarly, other hyperproliferative disorders can also be diagnosed, prognosed, prevented, and/or treated by polynucleotides, polypeptides, and/or agonists or antagonists of the invention. Examples of such hyperproliferative disorders include, but are not limited to: hypergammaglobulinemia, lymphoproliferative disorders, paraproteinemias, purpura, sarcoidosis, Sezary Syndrome, Waldenstron's macroglobulinemia, Gaucher's Disease, histiocytosis, and any other hyperproliferative disease, besides neoplasia, located in an organ system listed above.

[0601] Another preferred embodiment utilizes polynucleotides of the present invention to inhibit aberrant cellular division, by gene therapy using the present invention, and/or protein fusions or fragments thereof.

[0602] Thus, the present invention provides a method for treating cell proliferative disorders by inserting into an abnormally proliferating cell a polynucleotide of the present invention, wherein said polynucleotide represses said expression.

[0603] Another embodiment of the present invention provides a method of treating cell-proliferative disorders in individuals comprising administration of one or more active gene copies of the present invention to an abnormally proliferating cell or cells. In a preferred embodiment, polynucleotides of the present invention is a DNA construct comprising a recombinant expression vector effective in expressing a DNA sequence encoding said polynucleotides. In another preferred embodiment of the present invention, the DNA construct encoding the poynucleotides of the present invention is inserted into cells to be treated utilizing a retrovirus, or more preferably an adenoviral vector (See G J. Nabel, et. al., PNAS 1999 96: 324-326, which is hereby incorporated by reference). In a most preferred embodiment, the viral vector is defective and will not transform non-proliferating cells, only proliferating cells. Moreover, in a preferred embodiment, the polynucleotides of the present invention inserted into proliferating cells either alone, or in combination with or fused to other polynucleotides, can then be modulated via an external stimulus (i.e. magnetic, specific small molecule, chemical, or drug administration, etc.), which acts upon the promoter upstream of said polynucleotides to induce expression of the encoded protein product. As such the beneficial therapeutic affect of the present invention may be expressly modulated (i.e. to increase, decrease, or inhibit expression of the present invention) based upon said external stimulus.

[0604] Polynucleotides of the present invention may be useful in repressing expression of oncogenic genes or antigens. By “repressing expression of the oncogenic genes” is intended the suppression of the transcription of the gene, the degradation of the gene transcript (pre-message RNA), the inhibition of splicing, the destruction of the messenger RNA, the prevention of the post-translational modifications of the protein, the destruction of the protein, or the inhibition of the normal function of the protein.

[0605] For local administration to abnormally proliferating cells, polynucleotides of the present invention may be administered by any method known to those of skill in the art including, but not limited to transfection, electroporation, microinjection of cells, or in vehicles such as liposomes, lipofectin, or as naked polynucleotides, or any other method described throughout the specification. The polynucleotide of the present invention may be delivered by known gene delivery systems such as, but not limited to, retroviral vectors (Gilboa, J. Virology 44:845 (1982); Hocke, Nature 320:275 (1986); Wilson, et al., Proc. Natl. Acad. Sci. U.S.A. 85:3014), vaccinia virus system (Chakrabarty et al., Mol. Cell Biol. 5:3403 (1985) or other efficient DNA delivery systems (Yates et al., Nature 313:812 (1985)) known to those skilled in the art. These references are exemplary only and are hereby incorporated by reference. In order to specifically deliver or transfect cells which are abnormally proliferating and spare non-dividing cells, it is preferable to utilize a retrovirus, or adenoviral (as described in the art and elsewhere herein) delivery system known to those of skill in the art. Since host DNA replication is required for retroviral DNA to integrate and the retrovirus will be unable to self replicate due to the lack of the retrovirus genes needed for its life cycle. Utilizing such a retroviral delivery system for polynucleotides of the present invention will target said gene and constructs to abnormally proliferating cells and will spare the non-dividing normal cells.

[0606] The polynucleotides of the present invention may be delivered directly to cell proliferative disorder/disease sites in internal organs, body cavities and the like by use of imaging devices used to guide an injecting needle directly to the disease site. The polynucleotides of the present invention may also be administered to disease sites at the time of surgical intervention.

[0607] By “cell proliferative disease” is meant any human or animal disease or disorder, affecting any one or any combination of organs, cavities, or body parts, which is characterized by single or multiple local abnormal proliferations of cells, groups of cells, or tissues, whether benign or malignant.

[0608] Any amount of the polynucleotides of the present invention may be administered as long as it has a biologically inhibiting effect on the proliferation of the treated cells. Moreover, it is possible to administer more than one of the polynucleotide of the present invention simultaneously to the same site. By “biologically inhibiting” is meant partial or total growth inhibition as well as decreases in the rate of proliferation or growth of the cells. The biologically inhibitory dose may be determined by assessing the effects of the polynucleotides of the present invention on target malignant or abnormally proliferating cell growth in tissue culture, tumor growth in animals and cell cultures, or any other method known to one of ordinary skill in the art.

[0609] The present invention is further directed to antibody-based therapies which involve administering of anti-polypeptides and anti-polynucleotide antibodies to a mammalian, preferably human, patient for treating one or more of the described disorders. Methods for producing anti-polypeptides and anti-polynucleotide antibodies polyclonal and monoclonal antibodies are described in detail elsewhere herein. Such antibodies may be provided in pharmaceutically acceptable compositions as known in the art or as described herein.

[0610] A summary of the ways in which the antibodies of the present invention may be used therapeutically includes binding polynucleotides or polypeptides of the present invention locally or systemically in the body or by direct cytotoxicity of the antibody, e.g. as mediated by complement (CDC) or by effector cells (ADCC). Some of these approaches are described in more detail below. Armed with the teachings provided herein, one of ordinary skill in the art will know how to use the antibodies of the present invention for diagnostic, monitoring or therapeutic purposes without undue experimentation.

[0611] In particular, the antibodies, fragments and derivatives of the present invention are useful for treating a subject having or developing cell proliferative and/or differentiation disorders as described herein. Such treatment comprises administering a single or multiple doses of the antibody, or a fragment, derivative, or a conjugate thereof.

[0612] The antibodies of this invention may be advantageously utilized in combination with other monoclonal or chimeric antibodies, or with lymphokines or hematopoietic growth factors, for example., which serve to increase the number or activity of effector cells which interact with the antibodies.

[0613] It is preferred to use high affinity and/or potent in vivo inhibiting and/or neutralizing antibodies against polypeptides or polynucleotides of the present invention, fragments or regions thereof, for both immunoassays directed to and therapy of disorders related to polynucleotides or polypeptides, including fragements thereof, of the present invention. Such antibodies, fragments, or regions, will preferably have an affinity for polynucleotides or polypeptides, including fragements thereof. Preferred binding affinities include those with a dissociation constant or Kd less than 5×10⁻⁶M, 10⁻⁶M, ×10⁻⁷M, 10⁻⁷M, 5×10⁻⁸M, 10⁻⁸M, 5×10⁻⁹M, 10⁻⁹M, 5×10⁻¹⁰M, 10⁻¹⁰M, 5×10⁻¹¹M, 10⁻¹¹M, 5×10⁻¹²M, 10⁻¹²M, 5×10⁻¹³M, 10⁻¹³M, 5×10⁻¹⁴M, 10⁻¹⁴M, 5×10⁻¹⁵M, and 10⁻¹⁵M.

[0614] Moreover, polypeptides of the present invention are useful in inhibiting the angiogenesis of proliferative cells or tissues, either alone, as a protein fusion, or in combination with other polypeptides directly or indirectly, as described elsewhere herein. In a most preferred embodiment, said anti-angiogenesis effect may be achieved indirectly, for example, through the inhibition of hematopoietic, tumor-specific cells, such as tumor-associated macrophages (See Joseph IB, et al. J Natl Cancer Inst, 90(21):1648-53 (1998), which is hereby incorporated by reference). Antibodies directed to polypeptides or polynucleotides of the present invention may also result in inhibition of angiogenesis directly, or indirectly (See Witte L, et al., Cancer Metastasis Rev. 17(2):155-61 (1998), which is hereby incorporated by reference)).

[0615] Polypeptides, including protein fusions, of the present invention, or fragments thereof may be useful in inhibiting proliferative cells or tissues through the induction of apoptosis. Said polypeptides may act either directly, or indirectly to induce apoptosis of proliferative cells and tissues, for example in the activation of a death-domain receptor, such as tumor necrosis factor (TNF) receptor-1, CD95 (Fas/APO-1), TNF-receptor-related apoptosis-mediated protein (TRAMP) and TNF-related apoptosis-inducing ligand (TRAIL) receptor-1 and -2 (See Schulze-Osthoff K, et.al., Eur J Biochem 254(3):439-59 (1998), which is hereby incorporated by reference). Moreover, in another preferred embodiment of the present invention, said polypeptides may induce apoptosis through other mechanisms, such as in the activation of other proteins which will activate apoptosis, or through stimulating the expression of said proteins, either alone or in combination with small molecule drugs or adjuviants, such as apoptonin, galectins, thioredoxins, anti-inflammatory proteins (See for example, Mutat Res 400(1-2):447-55 (1998), Med Hypotheses.50(5):423-33 (1998), Chem Biol Interact. Apr 24;111-112:23-34 (1998), J Mol Med.76(6):402-12 (1998), Int J Tissue React;20(1):3-15 (1998), which are all hereby incorporated by reference).

[0616] Polypeptides, including protein fusions to, or fragments thereof, of the present invention are useful in inhibiting the metastasis of proliferative cells or tissues. Inhibition may occur as a direct result of administering polypeptides, or antibodies directed to said polypeptides as described elsewere herein, or indirectly, such as activating the expression of proteins known to inhibit metastasis, for example alpha 4 integrins, (See, e.g., Curr Top Microbiol Inmunol 1998;231:125-41, which is hereby incorporated by reference). Such thereapeutic affects of the present invention may be achieved either alone, or in combination with small molecule drugs or adjuvants.

[0617] In another embodiment, the invention provides a method of delivering compositions containing the polypeptides of the invention (e.g., compositions containing polypeptides or polypeptide antibodes associated with heterologous polypeptides, heterologous nucleic acids, toxins, or prodrugs) to targeted cells expressing the polypeptide of the present invention. Polypeptides or polypeptide antibodes of the invention may be associated with with heterologous polypeptides, heterologous nucleic acids, toxins, or prodrugs via hydrophobic, hydrophilic, ionic and/or covalent interactions.

[0618] Polypeptides, protein fusions to, or fragments thereof, of the present invention are useful in enhancing the immunogenicity and/or antigenicity of proliferating cells or tissues, either directly, such as would occur if the polypeptides of the present invention ‘vaccinated’ the immune response to respond to proliferative antigens and immunogens, or indirectly, such as in activating the expression of proteins known to enhance the immune response (e.g. chemokines), to said antigens and immunogens.

[0619] Renal Disorders

[0620] Polynucleotides, polypeptides, antibodies, and/or agonists or antagonists of the present invention, may be used to treat, prevent, diagnose, and/or prognose disorders of the renal system. Renal disorders which can be diagnosed, prognosed, prevented, and/or treated with compositions of the invention include, but are not limited to, kidney failure, nephritis, blood vessel disorders of kidney, metabolic and congenital kidney disorders, urinary disorders of the kidney, autoimmune disorders, sclerosis and necrosis, electrolyte imbalance, and kidney cancers.

[0621] Kidney diseases which can be diagnosed, prognosed, prevented, and/or treated with compositions of the invention include, but are not limited to, acute kidney failure, chronic kidney failure, atheroembolic renal failure, end-stage renal disease, inflammatory diseases of the kidney (e.g., acute glomerulonephritis, postinfectious glomerulonephritis, rapidly progressive glomerulonephritis, nephrotic syndrome, membranous glomerulonephritis, familial nephrotic syndrome, membranoproliferative glomerulonephritis I and II, mesangial proliferative glomerulonephritis, chronic glomerulonephritis, acute tubulointerstitial nephritis, chronic tubulointerstitial nephritis, acute post-streptococcal glomerulonephritis (PSGN), pyelonephritis, lupus nephritis, chronic nephritis, interstitial nephritis, and post-streptococcal glomerulonephritis), blood vessel disorders of the kidneys (e.g., kidney infarction, atheroembolic kidney disease, cortical necrosis, malignant nephrosclerosis, renal vein thrombosis, renal underperfusion, renal retinopathy, renal ischemia-reperfusion, renal artery embolism, and renal artery stenosis), and kidney disorders resulting form urinary tract disease (e.g., pyelonephritis, hydronephrosis, urolithiasis (renal lithiasis, nephrolithiasis), reflux nephropathy, urinary tract infections, urinary retention, and acute or chronic unilateral obstructive uropathy.)

[0622] In addition, compositions of the invention can be used to diagnose, prognose, prevent, and/or treat metabolic and congenital disorders of the kidney (e.g., uremia, renal amyloidosis, renal osteodystrophy, renal tubular acidosis, renal glycosuria, nephrogenic diabetes insipidus, cystinuria, Fanconi's syndrome, renal fibrocystic osteosis (renal rickets), Hartnup disease, Bartter's syndrome, Liddle's syndrome, polycystic kidney disease, medullary cystic disease, medullary sponge kidney, Alport's syndrome, nail-patella syndrome, congenital nephrotic syndrome, CRUSH syndrome, horseshoe kidney, diabetic nephropathy, nephrogenic diabetes insipidus, analgesic nephropathy, kidney stones, and membranous nephropathy), and autoimmune disorders of the kidney (e.g., systemic lupus erythematosus (SLE), Goodpasture syndrome, IgA nephropathy, and IgM mesangial proliferative glomerulonephritis).

[0623] Compositions of the invention can also be used to diagnose, prognose, prevent, and/or treat sclerotic or necrotic disorders of the kidney (e.g., glomerulosclerosis, diabetic nephropathy, focal segmental glomerulosclerosis (FSGS), necrotizing glomerulonephritis, and renal papillary necrosis), cancers of the kidney (e.g., nephroma, hypernephroma, nephroblastoma, renal cell cancer, transitional cell cancer, renal adenocarcinoma, squamous cell cancer, and Wilm's tumor), and electrolyte imbalances (e.g., nephrocalcinosis, pyria, edema, hydronephritis, proteinuria, hyponatremia, hypernatremia, hypokalemia, hyperkalemia, hypocalcemia, hypercalcemia, hypophosphatemia, and hyperphosphatemia).

[0624] Polypeptides may be administered using any method known in the art, including, but not limited to, direct needle injection at the delivery site, intravenous injection, topical administration, catheter infusion, biolistic injectors, particle accelerators, gelfoam sponge depots, other commercially available depot materials, osmotic pumps, oral or suppositorial solid pharmaceutical formulations, decanting or topical applications during surgery, aerosol delivery. Such methods are known in the art. Polypeptides may be administered as part of a Therapeutic, described in more detail below. Methods of delivering polynucleotides are described in more detail herein.

[0625] Cardiovascular Disorders

[0626] Polynucleotides or polypeptides, or agonists or antagonists of the present invention, may be used to treat, prevent, diagnose, and/or prognose cardiovascular disorders, including, but not limited to, peripheral artery disease, such as limb ischemia.

[0627] Cardiovascular disorders include, but are not limited to, cardiovascular abnormalities, such as arterio-arterial fistula, arteriovenous fistula, cerebral arteriovenous malformations, congenital heart defects, pulmonary atresia, and Scimitar Syndrome. Congenital heart defects include, but are not limited to, aortic coarctation, cor triatriatum, coronary vessel anomalies, crisscross heart, dextrocardia, patent ductus arteriosus, Ebstein's anomaly, Eisenmenger complex, hypoplastic left heart syndrome, levocardia, tetralogy of fallot, transposition of great vessels, double outlet right ventricle, tricuspid atresia, persistent truncus arteriosus, and heart septal defects, such as aortopulmonary septal defect, endocardial cushion defects, Lutembacher's Syndrome, trilogy of Fallot, ventricular heart septal defects.

[0628] Cardiovascular disorders also include, but are not limited to, heart disease, such as arrhythmias, carcinoid heart disease, high cardiac output, low cardiac output, cardiac tamponade, endocarditis (including bacterial), heart aneurysm, cardiac arrest, congestive heart failure, congestive cardiomyopathy, paroxysmal dyspnea, cardiac edema, heart hypertrophy, congestive cardiomyopathy, left ventricular hypertrophy, right ventricular hypertrophy, post-infarction heart rupture, ventricular septal rupture, heart valve diseases, myocardial diseases, myocardial ischemia, pericardial effusion, pericarditis (including constrictive and tuberculous), pneumopericardium, postpericardiotomy syndrome, pulmonary heart disease, rheumatic heart disease, ventricular dysfunction, hyperemia, cardiovascular pregnancy complications, Scimitar Syndrome, cardiovascular syphilis, and cardiovascular tuberculosis.

[0629] Arrhythmias include, but are not limited to, sinus arrhythmia, atrial fibrillation, atrial flutter, bradycardia, extrasystole, Adams-Stokes Syndrome, bundle-branch block, sinoatrial block, long QT syndrome, parasystole, Lown-Ganong-Levine Syndrome, Mahaim-type pre-excitation syndrome, Wolff-Parkinson-White syndrome, sick sinus syndrome, tachycardias, and ventricular fibrillation. Tachycardias include paroxysmal tachycardia, supraventricular tachycardia, accelerated idioventricular rhythm, atrioventricular nodal reentry tachycardia, ectopic atrial tachycardia, ectopic junctional tachycardia, sinoatrial nodal reentry tachycardia, sinus tachycardia, Torsades de Pointes, and ventricular tachycardia.

[0630] Heart valve diseases include, but are not limited to, aortic valve insufficiency, aortic valve stenosis, hear murmurs, aortic valve prolapse, mitral valve prolapse, tricuspid valve prolapse, mitral valve insufficiency, mitral valve stenosis, pulmonary atresia, pulmonary valve insufficiency, pulmonary valve stenosis, tricuspid atresia, tricuspid valve insufficiency, and tricuspid valve stenosis.

[0631] Myocardial diseases include, but are not limited to, alcoholic cardiomyopathy, congestive cardiomyopathy, hypertrophic cardiomyopathy, aortic subvalvular stenosis, pulmonary subvalvular stenosis, restrictive cardiomyopathy, Chagas cardiomyopathy, endocardial fibroelastosis, endomyocardial fibrosis, Kearns Syndrome, myocardial reperfusion injury, and myocarditis.

[0632] Myocardial ischemias include, but are not limited to, coronary disease, such as angina pectoris, coronary aneurysm, coronary arteriosclerosis, coronary thrombosis, coronary vasospasm, myocardial infarction and myocardial stunning.

[0633] Cardiovascular diseases also include vascular diseases such as aneurysms, angiodysplasia, angiomatosis, bacillary angiomatosis, Hippel-Lindau Disease, Klippel-Trenaunay-Weber Syndrome, Sturge-Weber Syndrome, angioneurotic edema, aortic diseases, Takayasu's Arteritis, aortitis, Leriche's Syndrome, arterial occlusive diseases, arteritis, enarteritis, polyarteritis nodosa, cerebrovascular disorders, diabetic angiopathies, diabetic retinopathy, embolisms, thrombosis, erythromelalgia, hemorrhoids, hepatic veno-occlusive disease, hypertension, hypotension, ischemia, peripheral vascular diseases, phlebitis, pulmonary veno-occlusive disease, Raynaud's disease, CREST syndrome, retinal vein occlusion, Scimitar syndrome, superior vena cava syndrome, telangiectasia, atacia telangiectasia, hereditary hemorrhagic telangiectasia, varicocele, varicose veins, varicose ulcer, vasculitis, and venous insufficiency.

[0634] Aneurysms include, but are not limited to, dissecting aneurysms, false aneurysms, infected aneurysms, ruptured aneurysms, aortic aneurysms, cerebral aneurysms, coronary aneurysms, heart aneurysms, and iliac aneurysms.

[0635] Arterial occlusive diseases include, but are not limited to, arteriosclerosis, intermittent claudication, carotid stenosis, fibromuscular dysplasias, mesenteric vascular occlusion, Moyamoya disease, renal artery obstruction, retinal artery occlusion, and thromboangiitis obliterans.

[0636] Cerebrovascular disorders include, but are not limited to, carotid artery diseases, cerebral amyloid angiopathy, cerebral aneurysm, cerebral anoxia, cerebral arteriosclerosis, cerebral arteriovenous malformation, cerebral artery diseases, cerebral embolism and thrombosis, carotid artery thrombosis, sinus thrombosis, Wallenberg's syndrome, cerebral hemorrhage, epidural hematoma, subdural hematoma, subaraxhnoid hemorrhage, cerebral infarction, cerebral ischemia (including transient), subclavian steal syndrome, periventricular leukomalacia, vascular headache, cluster headache, migraine, and vertebrobasilar insufficiency.

[0637] Embolisms include, but are not limited to, air embolisms, amniotic fluid embolisms, cholesterol embolisms, blue toe syndrome, fat embolisms, pulmonary embolisms, and thromoboembolisms. Thrombosis include, but are not limited to, coronary thrombosis, hepatic vein thrombosis, retinal vein occlusion, carotid artery thrombosis, sinus thrombosis, Wallenberg's syndrome, and thrombophlebitis.

[0638] Ischemic disorders include, but are not limited to, cerebral ischemia, ischemic colitis, compartment syndromes, anterior compartment syndrome, myocardial ischemia, reperfusion injuries, and peripheral limb ischemia. Vasculitis includes, but is not limited to, aortitis, arteritis, Behcet's Syndrome, Churg-Strauss Syndrome, mucocutaneous lymph node syndrome, thromboangiitis obliterans, hypersensitivity vasculitis, Schoenlein-Henoch purpura, allergic cutaneous vasculitis, and Wegener's granulomatosis.

[0639] Polypeptides may be administered using any method known in the art, including, but not limited to, direct needle injection at the delivery site, intravenous injection, topical administration, catheter infusion, biolistic injectors, particle accelerators, gelfoam sponge depots, other commercially available depot materials, osmotic pumps, oral or suppositorial solid pharmaceutical formulations, decanting or topical applications during surgery, aerosol delivery. Such methods are known in the art. Polypeptides may be administered as part of a Therapeutic, described in more detail below. Methods of delivering polynucleotides are described in more detail herein.

[0640] Respiratory Disorders

[0641] Polynucleotides or polypeptides, or agonists or antagonists of the present invention may be used to treat, prevent, diagnose, and/or prognose diseases and/or disorders of the respiratory system.

[0642] Diseases and disorders of the respiratory system include, but are not limited to, nasal vestibulitis, nonallergic rhinitis (e.g., acute rhinitis, chronic rhinitis, atrophic rhinitis, vasomotor rhinitis), nasal polyps, and sinusitis, juvenile angiofibromas, cancer of the nose and juvenile papillomas, vocal cord polyps, nodules (singer's nodules), contact ulcers, vocal cord paralysis, laryngoceles, pharyngitis (e.g., viral and bacterial), tonsillitis, tonsillar cellulitis, parapharyngeal abscess, laryngitis, laryngoceles, and throat cancers (e.g., cancer of the nasopharynx, tonsil cancer, larynx cancer), lung cancer (e.g., squamous cell carcinoma, small cell (oat cell) carcinoma, large cell carcinoma, and adenocarcinoma), allergic disorders (eosinophilic pneumonia, hypersensitivity pneumonitis (e.g., extrinsic allergic alveolitis, allergic interstitial pneumonitis, organic dust pneumoconiosis, allergic bronchopulmonary aspergillosis, asthma, Wegener's granulomatosis (granulomatous vasculitis), Goodpasture's syndrome)), pneumonia (e.g., bacterial pneumonia (e.g., Streptococcus pneumoniae (pneumoncoccal pneumonia), Staphylococcus aureus (staphylococcal pneumonia), Gram-negative bacterial pneumonia (caused by, e.g., Klebsiella and Pseudomas spp.), Mycoplasma pneumoniae pneumonia, Hemophilus influenzae pneumonia, Legionella pneumophila (Legionnaires' disease), and Chlamydia psittaci (Psittacosis)), and viral pneumonia (e.g., influenza, chickenpox (varicella).

[0643] Additional diseases and disorders of the respiratory system include, but are not limited to bronchiolitis, polio (poliomyelitis), croup, respiratory syncytial viral infection, mumps, erythema infectiosum (fifth disease), roseola infantum, progressive rubella panencephalitis, german measles, and subacute sclerosing panencephalitis), fungal pneumonia (e.g., Histoplasmosis, Coccidioidomycosis, Blastomycosis, fungal infections in people with severely suppressed immune systems (e.g., cryptococcosis, caused by Cryptococcus neoformans; aspergillosis, caused by Aspergillus spp.; candidiasis, caused by Candida; and mucormycosis)), Pneumocystis carinii (pneumocystis pneumonia), atypical pneumonias (e.g., Mycoplasma and Chlamydia spp.), opportunistic infection pneumonia, nosocomial pneumonia, chemical pneumonitis, and aspiration pneumonia, pleural disorders (e.g., pleurisy, pleural effusion, and pneumothorax (e.g., simple spontaneous pneumothorax, complicated spontaneous pneumothorax, tension pneumothorax)), obstructive airway diseases (e.g., asthma, chronic obstructive pulmonary disease (COPD), emphysema, chronic or acute bronchitis), occupational lung diseases (e.g., silicosis, black lung (coal workers' pneumoconiosis), asbestosis, berylliosis, occupational asthsma, byssinosis, and benign pneumoconioses), Infiltrative Lung Disease (e.g., pulmonary fibrosis (e.g., fibrosing alveolitis, usual interstitial pneumonia), idiopathic pulmonary fibrosis, desquamative interstitial pneumonia, lymphoid interstitial pneumonia, histiocytosis X (e.g., Letterer-Siwe disease, Hand-Schüller-Christian disease, eosinophilic granuloma), idiopathic pulmonary hemosiderosis, sarcoidosis and pulmonary alveolar proteinosis), Acute respiratory distress syndrome (also called, e.g., adult respiratory distress syndrome), edema, pulmonary embolism, bronchitis (e.g., viral, bacterial), bronchiectasis, atelectasis, lung abscess (caused by, e.g., Staphylococcus aureus or Legionella pneumophila), and cystic fibrosis.

[0644] Anti-angiogenesis Activity

[0645] The naturally occurring balance between endogenous stimulators and inhibitors of angiogenesis is one in which inhibitory influences predominate. Rastinejad et al., Cell 56:345-355 (1989). In those rare instances in which neovascularization occurs under normal physiological conditions, such as wound healing, organ regeneration, embryonic development, and female reproductive processes, angiogenesis is stringently regulated and spatially and temporally delimited. Under conditions of pathological angiogenesis such as that characterizing solid tumor growth, these regulatory controls fail. Unregulated angiogenesis becomes pathologic and sustains progression of many neoplastic and non-neoplastic diseases. A number of serious diseases are dominated by abnormal neovascularization including solid tumor growth and metastases, arthritis, some types of eye disorders, and psoriasis. See, e.g., reviews by Moses et al., Biotech. 9:630-634 (1991); Folkman et al., N. Engl. J Med., 333:1757-1763 (1995); Auerbach et al., J. Microvasc. Res. 29:401-411 (1985); Folkman, Advances in Cancer Research, eds. Klein and Weinhouse, Academic Press, New York, pp. 175-203 (1985); Patz, Am. J Opthalmol. 94:715-743 (1982); and Folkman et al., Science 221:719-725 (1983). In a number of pathological conditions, the process of angiogenesis contributes to the disease state. For example, significant data have accumulated which suggest that the growth of solid tumors is dependent on angiogenesis. Folkman and Klagsbrun, Science 235:442-447 (1987).

[0646] The present invention provides for treatment of diseases or disorders associated with neovascularization by administration of the polynucleotides and/or polypeptides of the invention, as well as agonists or antagonists of the present invention. Malignant and metastatic conditions which can be treated with the polynucleotides and polypeptides, or agonists or antagonists of the invention include, but are not limited to, malignancies, solid tumors, and cancers described herein and otherwise known in the art (for a review of such disorders, see Fishman et al., Medicine, 2d Ed., J. B. Lippincott Co., Philadelphia (1985)).Thus, the present invention provides a method of treating an angiogenesis-related disease and/or disorder, comprising administering to an individual in need thereof a therapeutically effective amount of a polynucleotide, polypeptide, antagonist and/or agonist of the invention. For example, polynucleotides, polypeptides, antagonists and/or agonists may be utilized in a variety of additional methods in order to therapeutically treat a cancer or tumor. Cancers which may be treated with polynucleotides, polypeptides, antagonists and/or agonists include, but are not limited to solid tumors, including prostate, lung, breast, ovarian, stomach, pancreas, larynx, esophagus, testes, liver, parotid, biliary tract, colon, rectum, cervix, uterus, endometrium, kidney, bladder, thyroid cancer; primary tumors and metastases; melanomas; glioblastoma; Kaposi's sarcoma; leiomyosarcoma; non- small cell lung cancer; colorectal cancer; advanced malignancies; and blood born tumors such as leukemias. For example, polynucleotides, polypeptides, antagonists and/or agonists may be delivered topically, in order to treat cancers such as skin cancer, head and neck tumors, breast tumors, and Kaposi's sarcoma.

[0647] Within yet other aspects, polynucleotides, polypeptides, antagonists and/or agonists may be utilized to treat superficial forms of bladder cancer by, for example, intravesical administration. Polynucleotides, polypeptides, antagonists and/or agonists may be delivered directly into the tumor, or near the tumor site, via injection or a catheter. Of course, as the artisan of ordinary skill will appreciate, the appropriate mode of administration will vary according to the cancer to be treated. Other modes of delivery are discussed herein.

[0648] Polynucleotides, polypeptides, antagonists and/or agonists may be useful in treating other disorders, besides cancers, which involve angiogenesis. These disorders include, but are not limited to: benign tumors, for example hemangiomas, acoustic neuromas, neurofibromas, trachomas, and pyogenic granulomas; artheroscleric plaques; ocular angiogenic diseases, for example, diabetic retinopathy, retinopathy of prematurity, macular degeneration, corneal graft rejection, neovascular glaucoma, retrolental fibroplasia, rubeosis, retinoblastoma, uvietis and Pterygia (abnormal blood vessel growth) of the eye; rheumatoid arthritis; psoriasis; delayed wound healing; endometriosis; vasculogenesis; granulations; hypertrophic scars (keloids); nonunion fractures; scleroderma; trachoma; vascular adhesions; myocardial angiogenesis; coronary collaterals; cerebral collaterals; arteriovenous malformations; ischemic limb angiogenesis; Osler-Webber Syndrome; plaque neovascularization; telangiectasia; hemophiliac joints; angiofibroma; fibromuscular dysplasia; wound granulation; Crohn's disease; and atherosclerosis.

[0649] For example, within one aspect of the present invention methods are provided for treating hypertrophic scars and keloids, comprising the step of administering a polynucleotide, polypeptide, antagonist and/or agonist of the invention to a hypertrophic scar or keloid.

[0650] Within one embodiment of the present invention polynucleotides, polypeptides, antagonists and/or agonists of the invention are directly injected into a hypertrophic scar or keloid, in order to prevent the progression of these lesions. This therapy is of particular value in the prophylactic treatment of conditions which are known to result in the development of hypertrophic scars and keloids (e.g., bums), and is preferably initiated after the proliferative phase has had time to progress (approximately 14 days after the initial injury), but before hypertrophic scar or keloid development. As noted above, the present invention also provides methods for treating neovascular diseases of the eye, including for example, corneal neovascularization, neovascular glaucoma, proliferative diabetic retinopathy, retrolental fibroplasia and macular degeneration.

[0651] Moreover, Ocular disorders associated with neovascularization which can be treated with the polynucleotides and polypeptides of the present invention (including agonists and/or antagonists) include, but are not limited to: neovascular glaucoma, diabetic retinopathy, retinoblastoma, retrolental fibroplasia, uveitis, retinopathy of prematurity macular degeneration, corneal graft neovascularization, as well as other eye inflammatory diseases, ocular tumors and diseases associated with choroidal or iris neovascularization. See, e.g., reviews by Waltman et al., Am. J. Ophthal. 85:704-710 (1978) and Gartner et al., Surv. Ophthal. 22:291-312 (1978).

[0652] Thus, within one aspect of the present invention methods are provided for treating neovascular diseases of the eye such as corneal neovascularization (including corneal graft neovascularization), comprising the step of administering to a patient a therapeutically effective amount of a compound (as described above) to the cornea, such that the formation of blood vessels is inhibited. Briefly, the cornea is a tissue which normally lacks blood vessels. In certain pathological conditions however, capillaries may extend into the cornea from the pericorneal vascular plexus of the limbus. When the cornea becomes vascularized, it also becomes clouded, resulting in a decline in the patient's visual acuity. Visual loss may become complete if the cornea completely opacitates. A wide variety of disorders can result in corneal neovascularization, including for example, corneal infections (e.g., trachoma, herpes simplex keratitis, leishmaniasis and onchocerciasis), immunological processes (e.g., graft rejection and Stevens-Johnson's syndrome), alkali burns, trauma, inflammation (of any cause), toxic and nutritional deficiency states, and as a complication of wearing contact lenses.

[0653] Within particularly preferred embodiments of the invention, may be prepared for topical administration in saline (combined with any of the preservatives and antimicrobial agents commonly used in ocular preparations), and administered in eyedrop form. The solution or suspension may be prepared in its pure form and administered several times daily. Alternatively, anti-angiogenic compositions, prepared as described above, may also be administered directly to the cornea. Within preferred embodiments, the anti-angiogenic composition is prepared with a muco-adhesive polymer which binds to cornea. Within further embodiments, the anti-angiogenic factors or anti-angiogenic compositions may be utilized as an adjunct to conventional steroid therapy. Topical therapy may also be useful prophylactically in corneal lesions which are known to have a high probability of inducing an angiogenic response (such as chemical burns). In these instances the treatment, likely in combination with steroids, may be instituted immediately to help prevent subsequent complications.

[0654] Within other embodiments, the compounds described above may be injected directly into the corneal stroma by an ophthalmologist under microscopic guidance. The preferred site of injection may vary with the morphology of the individual lesion, but the goal of the administration would be to place the composition at the advancing front of the vasculature (i.e., interspersed between the blood vessels and the normal cornea). In most cases this would involve perilimbic corneal injection to “protect” the cornea from the advancing blood vessels. This method may also be utilized shortly after a corneal insult in order to prophylactically prevent corneal neovascularization. In this situation the material could be injected in the perilimbic cornea interspersed between the corneal lesion and its undesired potential limbic blood supply. Such methods may also be utilized in a similar fashion to prevent capillary invasion of transplanted corneas. In a sustained-release form injections might only be required 2-3 times per year. A steroid could also be added to the injection solution to reduce inflammation resulting from the injection itself.

[0655] Within another aspect of the present invention, methods are provided for treating neovascular glaucoma, comprising the step of administering to a patient a therapeutically effective amount of a polynucleotide, polypeptide, antagonist and/or agonist to the eye, such that the formation of blood vessels is inhibited. In one embodiment, the compound may be administered topically to the eye in order to treat early forms of neovascular glaucoma. Within other embodiments, the compound may be implanted by injection into the region of the anterior chamber angle. Within other embodiments, the compound may also be placed in any location such that the compound is continuously released into the aqueous humor. Within another aspect of the present invention, methods are provided for treating proliferative diabetic retinopathy, comprising the step of administering to a patient a therapeutically effective amount of a polynucleotide, polypeptide, antagonist and/or agonist to the eyes, such that the formation of blood vessels is inhibited.

[0656] Within particularly preferred embodiments of the invention, proliferative diabetic retinopathy may be treated by injection into the aqueous humor or the vitreous, in order to increase the local concentration of the polynucleotide, polypeptide, antagonist and/or agonist in the retina. Preferably, this treatment should be initiated prior to the acquisition of severe disease requiring photocoagulation.

[0657] Within another aspect of the present invention, methods are provided for treating retrolental fibroplasia, comprising the step of administering to a patient a therapeutically effective amount of a polynucleotide, polypeptide, antagonist and/or agonist to the eye, such that the formation of blood vessels is inhibited. The compound may be administered topically, via intravitreous injection and/or via intraocular implants.

[0658] Additionally, disorders which can be treated with the polynucleotides, polypeptides, agonists and/or agonists include, but are not limited to, hemangioma, arthritis, psoriasis, angiofibroma, atherosclerotic plaques, delayed wound healing, granulations, hemophilic joints, hypertrophic scars, nonunion fractures, Osler-Weber syndrome, pyogenic granuloma, scleroderma, trachoma, and vascular adhesions.

[0659] Moreover, disorders and/or states, which can be treated, prevented, diagnosed, and/or prognosed with the the polynucleotides, polypeptides, agonists and/or agonists of the invention include, but are not limited to, solid tumors, blood born tumors such as leukemias, tumor metastasis, Kaposi's sarcoma, benign tumors, for example hemangiomas, acoustic neuromas, neurofibromas, trachomas, and pyogenic granulomas, rheumatoid arthritis, psoriasis, ocular angiogenic diseases, for example, diabetic retinopathy, retinopathy of prematurity, macular degeneration, corneal graft rejection, neovascular glaucoma, retrolental fibroplasia, rubeosis, retinoblastoma, and uvietis, delayed wound healing, endometriosis, vascluogenesis, granulations, hypertrophic scars (keloids), nonunion fractures, scleroderma, trachoma, vascular adhesions, myocardial angiogenesis, coronary collaterals, cerebral collaterals, arteriovenous malformations, ischemic limb angiogenesis, Osler-Webber Syndrome, plaque neovascularization, telangiectasia, hemophiliac joints, angiofibroma fibromuscular dysplasia, wound granulation, Crohn's disease, atherosclerosis, birth control agent by preventing vascularization required for embryo implantation controlling menstruation, diseases that have angiogenesis as a pathologic consequence such as cat scratch disease (Rochele minalia quintosa), ulcers (Helicobacter pylori), Bartonellosis and bacillary angiomatosis.

[0660] In one aspect of the birth control method, an amount of the compound sufficient to block embryo implantation is administered before or after intercourse and fertilization have occurred, thus providing an effective method of birth control, possibly a “morning after” method. Polynucleotides, polypeptides, agonists and/or agonists may also be used in controlling menstruation or administered as either a peritoneal lavage fluid or for peritoneal implantation in the treatment of endometriosis.

[0661] Polynucleotides, polypeptides, agonists and/or agonists of the present invention may be incorporated into surgical sutures in order to prevent stitch granulomas.

[0662] Polynucleotides, polypeptides, agonists and/or agonists may be utilized in a wide variety of surgical procedures. For example, within one aspect of the present invention a compositions (in the form of, for example, a spray or film) may be utilized to coat or spray an area prior to removal of a tumor, in order to isolate normal surrounding tissues from malignant tissue, and/or to prevent the spread of disease to surrounding tissues. Within other aspects of the present invention, compositions (e.g., in the form of a spray) may be delivered via endoscopic procedures in order to coat tumors, or inhibit angiogenesis in a desired locale. Within yet other aspects of the present invention, surgical meshes which have been coated with anti-angiogenic compositions of the present invention may be utilized in any procedure wherein a surgical mesh might be utilized. For example, within one embodiment of the invention a surgical mesh laden with an anti-angiogenic composition may be utilized during abdominal cancer resection surgery (e.g., subsequent to colon resection) in order to provide support to the structure, and to release an amount of the anti-angiogenic factor.

[0663] Within further aspects of the present invention, methods are provided for treating tumor excision sites, comprising administering a polynucleotide, polypeptide, agonist and/or agonist to the resection margins of a tumor subsequent to excision, such that the local recurrence of cancer and the formation of new blood vessels at the site is inhibited. Within one embodiment of the invention, the anti-angiogenic compound is administered directly to the tumor excision site (e.g., applied by swabbing, brushing or otherwise coating the resection margins of the tumor with the anti-angiogenic compound). Alternatively, the anti-angiogenic compounds may be incorporated into known surgical pastes prior to administration. Within particularly preferred embodiments of the invention, the anti-angiogenic compounds are applied after hepatic resections for malignancy, and after neurosurgical operations.

[0664] Within one aspect of the present invention, polynucleotides, polypeptides, agonists and/or agonists may be administered to the resection margin of a wide variety of tumors, including for example, breast, colon, brain and hepatic tumors. For example, within one embodiment of the invention, anti-angiogenic compounds may be administered to the site of a neurological tumor subsequent to excision, such that the formation of new blood vessels at the site are inhibited.

[0665] The polynucleotides, polypeptides, agonists and/or agonists of the present invention may also be administered along with other anti-angiogenic factors. Representative examples of other anti-angiogenic factors include: Anti-Invasive Factor, retinoic acid and derivatives thereof, paclitaxel, Suramin, Tissue Inhibitor of Metalloproteinase-1, Tissue Inhibitor of Metalloproteinase-2, Plasminogen Activator Inhibitor-1, Plasminogen Activator Inhibitor-2, and various forms of the lighter “d group” transition metals.

[0666] Lighter “d group” transition metals include, for example, vanadium, molybdenum, tungsten, titanium, niobium, and tantalum species. Such transition metal species may form transition metal complexes. Suitable complexes of the above-mentioned transition metal species include oxo transition metal complexes.

[0667] Representative examples of vanadium complexes include oxo vanadium complexes such as vanadate and vanadyl complexes. Suitable vanadate complexes include metavanadate and orthovanadate complexes such as, for example, ammonium metavanadate, sodium metavanadate, and sodium orthovanadate. Suitable vanadyl complexes include, for example, vanadyl acetylacetonate and vanadyl sulfate including vanadyl sulfate hydrates such as vanadyl sulfate mono- and trihydrates.

[0668] Representative examples of tungsten and molybdenum complexes also include oxo complexes. Suitable oxo tungsten complexes include tungstate and tungsten oxide complexes. Suitable tungstate complexes include ammonium tungstate, calcium tungstate, sodium tungstate dihydrate, and tungstic acid. Suitable tungsten oxides include tungsten (IV) oxide and tungsten (VI) oxide. Suitable oxo molybdenum complexes include molybdate, molybdenum oxide, and molybdenyl complexes. Suitable molybdate complexes include ammonium molybdate and its hydrates, sodium molybdate and its hydrates, and potassium molybdate and its hydrates. Suitable molybdenum oxides include molybdenum (VI) oxide, molybdenum (VI) oxide, and molybdic acid. Suitable molybdenyl complexes include, for example, molybdenyl acetylacetonate. Other suitable tungsten and molybdenum complexes include hydroxo derivatives derived from, for example, glycerol, tartaric acid, and sugars.

[0669] A wide variety of other anti-angiogenic factors may also be utilized within the context of the present invention. Representative examples include platelet factor 4; protamine sulphate; sulphated chitin derivatives (prepared from queen crab shells), (Murata et al., Cancer Res. 51:22-26, 1991); Sulphated Polysaccharide Peptidoglycan Complex (SP-PG) (the function of this compound may be enhanced by the presence of steroids such as estrogen, and tamoxifen citrate); Staurosporine; modulators of matrix metabolism, including for example, proline analogs, cishydroxyproline, d,L-3,4-dehydroproline, Thiaproline, alpha,alpha-dipyridyl, aminopropionitrile fumarate; 4-propyl-5-(4-pyridinyl)-2(3H)-oxazolone; Methotrexate; Mitoxantrone; Heparin; Interferons; 2 Macroglobulin-serum; ChIMP-3 (Pavloff et al., J. Bio. Chem. 267:17321-17326, 1992); Chymostatin (Tomkinson et al., Biochem J. 286:475-480, 1992); Cyclodextrin Tetradecasulfate; Eponemycin; Camptothecin; Fumagillin (Ingber et al., Nature 348:555-557, 1990); Gold Sodium Thiomalate (“GST”; Matsubara and Ziff, J. Clin. Invest. 79:1440-1446, 1987); anticollagenase-serum; alpha2-antiplasmin (Holmes et al., J. Biol. Chem. 262(4):1659-1664, 1987); Bisantrene (National Cancer Institute); Lobenzarit disodium (N-(2)-carboxyphenyl-4-chloroanthronilic acid disodium or “CCA”; Takeuchi et al., Agents Actions 36:312-316, 1992); Thalidomide; Angostatic steroid; AGM-1470; carboxynaminohnidazole; and metalloproteinase inhibitors such as BB94.

[0670] Diseases at the Cellular Level

[0671] Diseases associated with increased cell survival or the inhibition of apoptosis that could be treated, prevented, diagnosed, and/or prognosed using polynucleotides or polypeptides, as well as antagonists or agonists of the present invention, include cancers (such as follicular lymphomas, carcinomas with p53 mutations, and hormone-dependent tumors, including, but not limited to colon cancer, cardiac tumors, pancreatic cancer, melanoma, retinoblastoma, glioblastoma, lung cancer, intestinal cancer, testicular cancer, stomach cancer, neuroblastoma, myxoma, myoma, lymphoma, endothelioma, osteoblastoma, osteoclastoma, osteosarcoma, chondrosarcoma, adenoma, breast cancer, prostate cancer, Kaposi's sarcoma and ovarian cancer); autoimmune disorders (such as, multiple sclerosis, Sjogren's syndrome, Hashimoto's thyroiditis, biliary cirrhosis, Behcet's disease, Crohn's disease, polymyositis, systemic lupus erythematosus and immune-related glomerulonephritis and rheumatoid arthritis) and viral infections (such as herpes viruses, pox viruses and adenoviruses), inflammation, graft v. host disease, acute graft rejection, and chronic graft rejection.

[0672] In preferred embodiments, polynucleotides, polypeptides, and/or antagonists of the invention are used to inhibit growth, progression, and/or metasis of cancers, in particular those listed above.

[0673] Additional diseases or conditions associated with increased cell survival that could be treated or detected by polynucleotides or polypeptides, or agonists or antagonists of the present invention include, but are not limited to, progression, and/or metastases of malignancies and related disorders such as leukemia (including acute leukemias (e.g., acute lymphocytic leukemia, acute myelocytic leukemia (including myeloblastic, promyelocytic, myelomonocytic, monocytic, and erythroleukemia)) and chronic leukemias (e.g., chronic myelocytic (granulocytic) leukemia and chronic lymphocytic leukemia)), polycythemia vera, lymphomas (e.g., Hodgkin's disease and non-Hodgkin's disease), multiple myeloma, Waldenstrom's macroglobulinemia, heavy chain disease, and solid tumors including, but not limited to, sarcomas and carcinomas such as fibrosarcoma, myxosarcoma, liposarcoma, chondrosarcoma, osteogenic sarcoma, chordoma, angiosarcoma, endotheliosarcoma, lymphangiosarcoma, lymphangioendotheliosarcoma, synovioma, mesothelioma, Ewing's tumor, leiomyosarcoma, rhabdomyosarcoma, colon carcinoma, pancreatic cancer, breast cancer, ovarian cancer, prostate cancer, squamous cell carcinoma, basal cell carcinoma, adenocarcinoma, sweat gland carcinoma, sebaceous gland carcinoma, papillary carcinoma, papillary adenocarcinomas, cystadenocarcinoma, medullary carcinoma, bronchogenic carcinoma, renal cell carcinoma, hepatoma, bile duct carcinoma, choriocarcinoma, seminoma, embryonal carcinoma, Wilm's tumor, cervical cancer, testicular tumor, lung carcinoma, small cell lung carcinoma, bladder carcinoma, epithelial carcinoma, glioma, astrocytoma, medulloblastoma, craniopharyngioma, ependymoma, pinealoma, hemangioblastoma, acoustic neuroma, oligodendroglioma, menangioma, melanoma, neuroblastoma, and retinoblastoma.

[0674] Diseases associated with increased apoptosis that could be treated, prevented, diagnosed, and/or prognesed using polynucleotides or polypeptides, as well as agonists or antagonists of the present invention, include, but are not limited to, AIDS; neurodegenerative disorders (such as Alzheimer's disease, Parkinson's disease, Amyotrophic lateral sclerosis, Retinitis pigmentosa, Cerebellar degeneration and brain tumor or prior associated disease); autoimmune disorders (such as, multiple sclerosis, Sjogren's syndrome, Hashimoto's thyroiditis, biliary cirrhosis, Behcet's disease, Crohn's disease, polymyositis, systemic lupus erythematosus and immune-related glomerulonephritis and rheumatoid arthritis) myelodysplastic syndromes (such as aplastic anemia), graft v. host disease, ischemic injury (such as that caused by myocardial infarction, stroke and reperfusion injury), liver injury (e.g., hepatitis related liver injury, ischemia/reperfusion injury, cholestosis (bile duct injury) and liver cancer); toxin-induced liver disease (such as that caused by alcohol), septic shock, cachexia and anorexia.

[0675] Wound Healing and Epithelial Cell Proliferation

[0676] In accordance with yet a further aspect of the present invention, there is provided a process for utilizing polynucleotides or polypeptides, as well as agonists or antagonists of the present invention, for therapeutic purposes, for example, to stimulate epithelial cell proliferation and basal keratinocytes for the purpose of wound healing, and to stimulate hair follicle production and healing of dermal wounds. Polynucleotides or polypeptides, as well as agonists or antagonists of the present invention, may be clinically useful in stimulating wound healing including surgical wounds, excisional wounds, deep wounds involving damage of the dermis and epidermis, eye tissue wounds, dental tissue wounds, oral cavity wounds, diabetic ulcers, dermal ulcers, cubitus ulcers, arterial ulcers, venous stasis ulcers, burns resulting from heat exposure or chemicals, and other abnormal wound healing conditions such as uremia, malnutrition, vitamin deficiencies and complications associated with systemic treatment with steroids, radiation therapy and antineoplastic drugs and antimetabolites. Polynucleotides or polypeptides, as well as agonists or antagonists of the present invention, could be used to promote dermal reestablishment subsequent to dermal loss

[0677] Polynucleotides or polypeptides, as well as agonists or antagonists of the present invention, could be used to increase the adherence of skin grafts to a wound bed and to stimulate re-epithelialization from the wound bed. The following are types of grafts that polynucleotides or polypeptides, agonists or antagonists of the present invention, could be used to increase adherence to a wound bed: autografts, artificial skin, allografts, autodermic graft, autoepdermic grafts, avacular grafts, Blair-Brown grafts, bone graft, brephoplastic grafts, cutis graft, delayed graft, dermic graft, epidermic graft, fascia graft, full thickness graft, heterologous graft, xenograft, homologous graft, hyperplastic graft, lamellar graft, mesh graft, mucosal graft, Ollier-Thiersch graft, omenpal graft, patch graft, pedicle graft, penetrating graft, split skin graft, thick split graft. Polynucleotides or polypeptides, as well as agonists or antagonists of the present invention, can be used to promote skin strength and to improve the appearance of aged skin.

[0678] It is believed that polynucleotides or polypeptides, as well as agonists or antagonists of the present invention, will also produce changes in hepatocyte proliferation, and epithelial cell proliferation in the lung, breast, pancreas, stomach, small intestine, and large intestine. Polynucleotides or polypeptides, as well as agonists or antagonists of the present invention, could promote proliferation of epithelial cells such as sebocytes, hair follicles, hepatocytes, type II pneumocytes, mucin-producing goblet cells, and other epithelial cells and their progenitors contained within the skin, lung, liver, and gastrointestinal tract. Polynucleotides or polypeptides, agonists or antagonists of the present invention, may promote proliferation of endothelial cells, keratinocytes, and basal keratinocytes.

[0679] Polynucleotides or polypeptides, as well as agonists or antagonists of the present invention, could also be used to reduce the side effects of gut toxicity that result from radiation, chemotherapy treatments or viral infections. Polynucleotides or polypeptides, as well as agonists or antagonists of the present invention, may have a cytoprotective effect on the small intestine mucosa. Polynucleotides or polypeptides, as well as agonists or antagonists of the present invention, may also stimulate healing of mucositis (mouth ulcers) that result from chemotherapy and viral infections.

[0680] Polynucleotides or polypeptides, as well as agonists or antagonists of the present invention, could further be used in full regeneration of skin in full and partial thickness skin defects, including bums, (i.e., repopulation of hair follicles, sweat glands, and sebaceous glands), treatment of other skin defects such as psoriasis. Polynucleotides or polypeptides, as well as agonists or antagonists of the present invention, could be used to treat epidermolysis bullosa, a defect in adherence of the epidermis to the underlying dermis which results in frequent, open and painful blisters by accelerating reepithelialization of these lesions. Polynucleotides or polypeptides, as well as agonists or antagonists of the present invention, could also be used to treat gastric and doudenal ulcers and help heal by scar formation of the mucosal lining and regeneration of glandular mucosa and duodenal mucosal lining more rapidly. Inflammatory bowel diseases, such as Crohn's disease and ulcerative colitis, are diseases which result in destruction of the mucosal surface of the small or large intestine, respectively. Thus, polynucleotides or polypeptides, as well as agonists or antagonists of the present invention, could be used to promote the resurfacing of the mucosal surface to aid more rapid healing and to prevent progression of inflammatory bowel disease. Treatment with polynucleotides or polypeptides, agonists or antagonists of the present invention, is expected to have a significant effect on the production of mucus throughout the gastrointestinal tract and could be used to protect the intestinal mucosa from injurious substances that are ingested or following surgery. Polynucleotides or polypeptides, as well as agonists or antagonists of the present invention, could be used to treat diseases associate with the under expression.

[0681] Moreover, polynucleotides or polypeptides, as well as agonists or antagonists of the present invention, could be used to prevent and heal damage to the lungs due to various pathological states. Polynucleotides or polypeptides, as well as agonists or antagonists of the present invention, which could stimulate proliferation and differentiation and promote the repair of alveoli and brochiolar epithelium to prevent or treat acute or chronic lung damage. For example, emphysema, which results in the progressive loss of aveoli, and inhalation injuries, i.e., resulting from smoke inhalation and bums, that cause necrosis of the bronchiolar epithelium and alveoli could be effectively treated using polynucleotides or polypeptides, agonists or antagonists of the present invention. Also, polynucleotides or polypeptides, as well as agonists or antagonists of the present invention, could be used to stimulate the proliferation of and differentiation of type II pneumocytes, which may help treat or prevent disease such as hyaline membrane diseases, such as infant respiratory distress syndrome and bronchopulmonary displasia, in premature infants.

[0682] Polynucleotides or polypeptides, as well as agonists or antagonists of the present invention, could stimulate the proliferation and differentiation of hepatocytes and, thus, could be used to alleviate or treat liver diseases and pathologies such as fulminant liver failure caused by cirrhosis, liver damage caused by viral hepatitis and toxic substances (i.e., acetaminophen, carbon tetraholoride and other hepatotoxins known in the art).

[0683] In addition, polynucleotides or polypeptides, as well as agonists or antagonists of the present invention, could be used treat or prevent the onset of diabetes mellitus. In patients with newly diagnosed Types I and II diabetes, where some islet cell function remains, polynucleotides or polypeptides, as well as agonists or antagonists of the present invention, could be used to maintain the islet function so as to alleviate, delay or prevent permanent manifestation of the disease. Also, polynucleotides or polypeptides, as well as agonists or antagonists of the present invention, could be used as an auxiliary in islet cell transplantation to improve or promote islet cell function.

[0684] Neural Activity and Neurological Diseases

[0685] The polynucleotides, polypeptides and agonists or antagonists of the invention may be used for the diagnosis and/or treatment of diseases, disorders, damage or injury of the brain and/or nervous system. Nervous system disorders that can be treated with the compositions of the invention (e.g., polypeptides, polynucleotides, and/or agonists or antagonists), include, but are not limited to, nervous system injuries, and diseases or disorders which result in either a disconnection of axons, a diminution or degeneration of neurons, or demyelination. Nervous system lesions which may be treated in a patient (including human and non-human mammalian patients) according to the methods of the invention, include but are not limited to, the following lesions of either the central (including spinal cord, brain) or peripheral nervous systems: (1) ischemic lesions, in which a lack of oxygen in a portion of the nervous system results in neuronal injury or death, including cerebral infarction or ischemia, or spinal cord infarction or ischemia; (2) traumatic lesions, including lesions caused by physical injury or associated with surgery, for example, lesions which sever a portion of the nervous system, or compression injuries; (3) malignant lesions, in which a portion of the nervous system is destroyed or injured by malignant tissue which is either a nervous system associated malignancy or a malignancy derived from non-nervous system tissue; (4) infectious lesions, in which a portion of the nervous system is destroyed or injured as a result of infection, for example, by an abscess or associated with infection by human immunodeficiency virus, herpes zoster, or herpes simplex virus or with Lyme disease, tuberculosis, or syphilis; (5) degenerative lesions, in which a portion of the nervous system is destroyed or injured as a result of a degenerative process including but not limited to, degeneration associated with Parkinson's disease, Alzheimer's disease, Huntington's chorea, or amyotrophic lateral sclerosis (ALS); (6) lesions associated with nutritional diseases or disorders, in which a portion of the nervous system is destroyed or injured by a nutritional disorder or disorder of metabolism including, but not limited to, vitamin B12 deficiency, folic acid deficiency, Wemicke disease, tobacco-alcohol amblyopia, Marchiafava-Bignami disease (primary degeneration of the corpus callosum), and alcoholic cerebellar degeneration; (7) neurological lesions associated with systemic diseases including, but not limited to, diabetes (diabetic neuropathy, Bell's palsy), systemic lupus erythematosus, carcinoma, or sarcoidosis; (8) lesions caused by toxic substances including alcohol, lead, or particular neurotoxins; and (9) demyelinated lesions in which a portion of the nervous system is destroyed or injured by a demyelinating disease including, but not limited to, multiple sclerosis, human immunodeficiency virus-associated myelopathy, transverse myelopathy or various etiologies, progressive multifocal leukoencephalopathy, and central pontine myelinolysis.

[0686] In one embodiment, the polypeptides, polynucleotides, or agonists or antagonists of the invention are used to protect neural cells from the damaging effects of hypoxia. In a further preferred embodiment, the polypeptides, polynucleotides, or agonists or antagonists of the invention are used to protect neural cells from the damaging effects of cerebral hypoxia. According to this embodiment, the compositions of the invention are used to treat or prevent neural cell injury associated with cerebral hypoxia. In one non-exclusive aspect of this embodiment, the polypeptides, polynucleotides, or agonists or antagonists of the invention, are used to treat or prevent neural cell injury associated with cerebral ischemia. In another non-exclusive aspect of this embodiment, the polypeptides, polynucleotides, or agonists or antagonists of the invention are used to treat or prevent neural cell injury associated with cerebral infarction.

[0687] In another preferred embodiment, the polypeptides, polynucleotides, or agonists or antagonists of the invention are used to treat or prevent neural cell injury associated with a stroke. In a specific embodiment, the polypeptides, polynucleotides, or agonists or antagonists of the invention are used to treat or prevent cerebral neural cell injury associated with a stroke.

[0688] In another preferred embodiment, the polypeptides, polynucleotides, or agonists or antagonists of the invention are used to treat or prevent neural cell injury associated with a heart attack. In a specific embodiment, the polypeptides, polynucleotides, or agonists or antagonists of the invention are used to treat or prevent cerebral neural cell injury associated with a heart attack.

[0689] The compositions of the invention which are useful for treating or preventing a nervous system disorder may be selected by testing for biological activity in promoting the survival or differentiation of neurons. For example, and not by way of limitation, compositions of the invention which elicit any of the following effects may be useful according to the invention: (1) increased survival time of neurons in culture either in the presence or absence of hypoxia or hypoxic conditions; (2) increased sprouting of neurons in culture or in vivo; (3) increased production of a neuron-associated molecule in culture or in vivo, e.g., choline acetyltransferase or acetylcholinesterase with respect to motor neurons; or (4) decreased symptoms of neuron dysfunction in vivo. Such effects may be measured by any method known in the art. In preferred, non-limiting embodiments, increased survival of neurons may routinely be measured using a method set forth herein or otherwise known in the art, such as, for example, in Zhang et al., Proc Natl Acad Sci USA 97:3637-42 (2000) or in Arakawa et al., J. Neurosci., 10:3507-15 (1990); increased sprouting of neurons may be detected by methods known in the art, such as, for example, the methods set forth in Pestronk et al., Exp. Neurol., 70:65-82 (1980), or Brown et al., Ann. Rev. Neurosci., 4:17-42 (1981); increased production of neuron-associated molecules may be measured by bioassay, enzymatic assay, antibody binding, Northern blot assay, etc., using techniques known in the art and depending on the molecule to be measured; and motor neuron dysfunction may be measured by assessing the physical manifestation of motor neuron disorder, e.g., weakness, motor neuron conduction velocity, or functional disability.

[0690] In specific embodiments, motor neuron disorders that may be treated according to the invention include, but are not limited to, disorders such as infarction, infection, exposure to toxin, trauma, surgical damage, degenerative disease or malignancy that may affect motor neurons as well as other components of the nervous system, as well as disorders that selectively affect neurons such as amyotrophic lateral sclerosis, and including, but not limited to, progressive spinal muscular atrophy, progressive bulbar palsy, primary lateral sclerosis, infantile and juvenile muscular atrophy, progressive bulbar paralysis of childhood (Fazio-Londe syndrome), poliomyelitis and the post polio syndrome, and Hereditary Motorsensory Neuropathy (Charcot-Marie-Tooth Disease).

[0691] Further, polypeptides or polynucleotides of the invention may play a role in neuronal survival; synapse formation; conductance; neural differentiation, etc. Thus, compositions of the invention (including polynucleotides, polypeptides, and agonists or antagonists) may be used to diagnose and/or treat or prevent diseases or disorders associated with these roles, including, but not limited to, learning and/or cognition disorders. The compositions of the invention may also be useful in the treatment or prevention of neurodegenerative disease states and/or behavioural disorders. Such neurodegenerative disease states and/or behavioral disorders include, but are not limited to, Alzheimer's Disease, Parkinson's Disease, Huntington's Disease, Tourette Syndrome, schizophrenia, mania, dementia, paranoia, obsessive compulsive disorder, panic disorder, learning disabilities, ALS, psychoses, autism, and altered behaviors, including disorders in feeding, sleep patterns, balance, and perception. In addition, compositions of the invention may also play a role in the treatment, prevention and/or detection of developmental disorders associated with the developing embryo, or sexually-linked disorders.

[0692] Additionally, polypeptides, polynucleotides and/or agonists or antagonists of the invention, may be useful in protecting neural cells from diseases, damage, disorders, or injury, associated with cerebrovascular disorders including, but not limited to, carotid artery diseases (e.g., carotid artery thrombosis, carotid stenosis, or Moyamoya Disease), cerebral amyloid angiopathy, cerebral aneurysm, cerebral anoxia, cerebral arteriosclerosis, cerebral arteriovenous malformations, cerebral artery diseases, cerebral embolism and thrombosis (e.g., carotid artery thrombosis, sinus thrombosis, or Wallenberg's Syndrome), cerebral hemorrhage (e.g., epidural or subdural hematoma, or subarachnoid hemorrhage), cerebral infarction, cerebral ischemia (e.g., transient cerebral ischemia, Subclavian Steal Syndrome, or vertebrobasilar insufficiency), vascular dementia (e.g., multi-infarct), leukomalacia, periventricular, and vascular headache (e.g., cluster headache or migraines).

[0693] In accordance with yet a further aspect of the present invention, there is provided a process for utilizing polynucleotides or polypeptides, as well as agonists or antagonists of the present invention, for therapeutic purposes, for example, to stimulate neurological cell proliferation and/or differentiation. Therefore, polynucleotides, polypeptides, agonists and/or antagonists of the invention may be used to treat and/or detect neurologic diseases. Moreover, polynucleotides or polypeptides, or agonists or antagonists of the invention, can be used as a marker or detector of a particular nervous system disease or disorder.

[0694] Examples of neurologic diseases which can be treated or detected with polynucleotides, polypeptides, agonists, and/or antagonists of the present invention include brain diseases, such as metabolic brain diseases which includes phenylketonuria such as maternal phenylketonuria, pyruvate carboxylase deficiency, pyruvate dehydrogenase complex deficiency, Wernicke's Encephalopathy, brain edema, brain neoplasms such as cerebellar neoplasms which include infratentorial neoplasms, cerebral ventricle neoplasms such as choroid plexus neoplasms, hypothalamic neoplasms, supratentorial neoplasms, canavan disease, cerebellar diseases such as cerebellar ataxia which include spinocerebellar degeneration such as ataxia telangiectasia, cerebellar dyssynergia, Friederich's Ataxia, Machado-Joseph Disease, olivopontocerebellar atrophy, cerebellar neoplasms such as infratentorial neoplasms, diffuse cerebral sclerosis such as encephalitis periaxialis, globoid cell leukodystrophy, metachromatic leukodystrophy and subacute sclerosing panencephalitis.

[0695] Additional neurologic diseases which can be treated or detected with polynucleotides, polypeptides, agonists, and/or antagonists of the present invention include cerebrovascular disorders (such as carotid artery diseases which include carotid artery thrombosis, carotid stenosis and Moyamoya Disease), cerebral amyloid angiopathy, cerebral aneurysm, cerebral anoxia, cerebral arteriosclerosis, cerebral arteriovenous malformations, cerebral artery diseases, cerebral embolism and thrombosis such as carotid artery thrombosis, sinus thrombosis and Wallenberg's Syndrome, cerebral hemorrhage such as epidural hematoma, subdural hematoma and subarachnoid hemorrhage, cerebral infarction, cerebral ischemia such as transient cerebral ischemia, Subclavian Steal Syndrome and vertebrobasilar insufficiency, vascular dementia such as multi-infarct dementia, periventricular leukomalacia, vascular headache such as cluster headache and migraine.

[0696] Additional neurologic diseases which can be treated or detected with polynucleotides, polypeptides, agonists, and/or antagonists of the present invention include dementia such as AIDS Dementia Complex, presenile dementia such as Alzheimer's Disease and Creutzfeldt-Jakob Syndrome, senile dementia such as Alzheimer's Disease and progressive supranuclear palsy, vascular dementia such as multi-infarct dementia, encephalitis which include encephalitis periaxialis, viral encephalitis such as epidemic encephalitis, Japanese Encephalitis, St. Louis Encephalitis, tick-borne encephalitis and West Nile Fever, acute disseminated encephalomyelitis, meningoencephalitis such as uveomeningoencephalitic syndrome, Postencephalitic Parkinson Disease and subacute sclerosing panencephalitis, encephalomalacia such as periventricular leukomalacia, epilepsy such as generalized epilepsy which includes infantile spasms, absence epilepsy, myoclonic epilepsy which includes MERRF Syndrome, tonic-clonic epilepsy, partial epilepsy such as complex partial epilepsy, frontal lobe epilepsy and temporal lobe epilepsy, post-traumatic epilepsy, status epilepticus such as Epilepsia Partialis Continua, and Hallervorden-Spatz Syndrome.

[0697] Additional neurologic diseases which can be treated or detected with polynucleotides, polypeptides, agonists, and/or antagonists of the present invention include hydrocephalus such as Dandy-Walker Syndrome and normal pressure hydrocephalus, hypothalamic diseases such as hypothalamic neoplasms, cerebral malaria, narcolepsy which includes cataplexy, bulbar poliomyelitis, cerebri pseudotumor, Rett Syndrome, Reye's Syndrome, thalamic diseases, cerebral toxoplasmosis, intracranial tuberculoma and Zellweger Syndrome, central nervous system infections such as AIDS Dementia Complex, Brain Abscess, subdural empyema, encephalomyelitis such as Equine Encephalomyelitis, Venezuelan Equine Encephalomyelitis, Necrotizing Hemorrhagic Encephalomyelitis, Visna, and cerebral malaria.

[0698] Additional neurologic diseases which can be treated or detected with polynucleotides, polypeptides, agonists, and/or antagonists of the present invention include meningitis such as arachnoiditis, aseptic meningtitis such as viral meningtitis which includes lymphocytic choriomeningitis, Bacterial meningtitis which includes Haemophilus Meningtitis, Listeria Meningtitis, Meningococcal Meningtitis such as Waterhouse-Friderichsen Syndrome, Pneumococcal Meningtitis and meningeal tuberculosis, fungal meningitis such as Cryptococcal Meningtitis, subdural effusion, meningoencephalitis such as uvemeningoencephalitic syndrome, myelitis such as transverse myelitis, neurosyphilis such as tabes dorsalis, poliomyelitis which includes bulbar poliomyelitis and postpoliomyelitis syndrome, prion diseases (such as Creutzfeldt-Jakob Syndrome, Bovine Spongiform Encephalopathy, Gerstmann-Straussler Syndrome, Kuru, Scrapie), and cerebral toxoplasmosis.

[0699] Additional neurologic diseases which can be treated or detected with polynucleotides, polypeptides, agonists, and/or antagonists of the present invention include central nervous system neoplasms such as brain neoplasms that include cerebellar neoplasms such as infratentorial neoplasms, cerebral ventricle neoplasms such as choroid plexus neoplasms, hypothalamic neoplasms and supratentorial neoplasms, meningeal neoplasms, spinal cord neoplasms which include epidural neoplasms, demyelinating diseases such as Canavan Diseases, diffuse cerebral sceloris which includes adrenoleukodystrophy, encephalitis periaxialis, globoid cell leukodystrophy, diffuse cerebral sclerosis such as metachromatic leukodystrophy, allergic encephalomyelitis, necrotizing hemorrhagic encephalomyelitis, progressive multifocal leukoencephalopathy, multiple sclerosis, central pontine myelinolysis, transverse myelitis, neuromyelitis optica, Scrapie, Swayback, Chronic Fatigue Syndrome, Visna, High Pressure Nervous Syndrome, Meningism, spinal cord diseases such as amyotonia congenita, amyotrophic lateral sclerosis, spinal muscular atrophy such as Werdnig-Hoffmann Disease, spinal cord compression, spinal cord neoplasms such as epidural neoplasms, syringomyelia, Tabes Dorsalis, Stiff-Man Syndrome, mental retardation such as Angelman Syndrome, Cri-du-Chat Syndrome, De Lange's Syndrome, Down Syndrome, Gangliosidoses such as gangliosidoses G(M1), Sandhoff Disease, Tay-Sachs Disease, Hartnup Disease, homocystinuria, Laurence-Moon- Biedl Syndrome, Lesch-Nyhan Syndrome, Maple Syrup Urine Disease, mucolipidosis such as fucosidosis, neuronal ceroid-lipofuscinosis, oculocerebrorenal syndrome, phenylketonuria such as maternal phenylketonuria, Prader-Willi Syndrome, Rett Syndrome, Rubinstein-Taybi Syndrome, Tuberous Sclerosis, WAGR Syndrome, nervous system abnormalities such as holoprosencephaly, neural tube defects such as anencephaly which includes hydrangencephaly, Arnold-Chairi Deformity, encephalocele, meningocele, meningomyelocele, spinal dysraphism such as spina bifida cystica and spina bifida occulta.

[0700] Additional neurologic diseases which can be treated or detected with polynucleotides, polypeptides, agonists, and/or antagonists of the present invention include hereditary motor and sensory neuropathies which include Charcot-Marie Disease, Hereditary optic atrophy, Refsum's Disease, hereditary spastic paraplegia, Werdnig-Hoffmann Disease, Hereditary Sensory and Autonomic Neuropathies such as Congenital Analgesia and Familial Dysautonomia, Neurologic manifestations (such as agnosia that include Gerstmann's Syndrome, Amnesia such as retrograde amnesia, apraxia, neurogenic bladder, cataplexy, communicative disorders such as hearing disorders that includes deafness, partial hearing loss, loudness recruitment and tinnitus, language disorders such as aphasia which include agraphia, anomia, broca aphasia, and Wernicke Aphasia, Dyslexia such as Acquired Dyslexia, language development disorders, speech disorders such as aphasia which includes anomia, broca aphasia and Wernicke Aphasia, articulation disorders, communicative disorders such as speech disorders which include dysarthria, echolalia, mutism and stuttering, voice disorders such as aphonia and hoarseness, decerebrate state, delirium, fasciculation, hallucinations, meningism, movement disorders such as angelman syndrome, ataxia, athetosis, chorea, dystonia, hypokinesia, muscle hypotonia, myoclonus, tic, torticollis and tremor, muscle hypertonia such as muscle rigidity such as stiff-man syndrome, muscle spasticity, paralysis such as facial paralysis which includes Herpes Zoster Oticus, Gastroparesis, Hemiplegia, ophthalmoplegia such as diplopia, Duane's Syndrome, Horner's Syndrome, Chronic progressive external ophthalmoplegia such as Kearns Syndrome, Bulbar Paralysis, Tropical Spastic Paraparesis, Paraplegia such as Brown-Sequard Syndrome, quadriplegia, respiratory paralysis and vocal cord paralysis, paresis, phantom limb, taste disorders such as ageusia and dysgeusia, vision disorders such as amblyopia, blindness, color vision defects, diplopia, hemianopsia, scotoma and subnormal vision, sleep disorders such as hypersonmia which includes Kleine-Levin Syndrome, insomnia, and somnambulism, spasm such as trismus, unconsciousness such as coma, persistent vegetative state and syncope and vertigo, neuromuscular diseases such as amyotonia congenita, amyotrophic lateral sclerosis, Lambert-Eaton Myasthenic Syndrome, motor neuron disease, muscular atrophy such as spinal muscular atrophy, Charcot-Marie Disease and Werdnig-Hoffmann Disease, Postpoliomyelitis Syndrome, Muscular Dystrophy, Myasthenia Gravis, Myotonia Atrophica, Myotonia Confenita, Nemaline Myopathy, Familial Periodic Paralysis, Multiplex Paramyloclonus, Tropical Spastic Paraparesis and Stiff-Man Syndrome, peripheral nervous system diseases such as acrodynia, amyloid neuropathies, autonomic nervous system diseases such as Adie's Syndrome, Barre-Lieou Syndrome, Familial Dysautonomia, Horner's Syndrome, Reflex Sympathetic Dystrophy and Shy-Drager Syndrome, Cranial Nerve Diseases such as Acoustic Nerve Diseases such as Acoustic Neuroma which includes Neurofibromatosis 2, Facial Nerve Diseases such as Facial Neuralgia,Melkersson-Rosenthal Syndrome, ocular motility disorders which includes amblyopia, nystagmus, oculomotor nerve paralysis, ophthalmoplegia such as Duane's Syndrome, Homer's Syndrome, Chronic Progressive External Ophthalmoplegia which includes Kearns Syndrome, Strabismus such as Esotropia and Exotropia, Oculomotor Nerve Paralysis, Optic Nerve Diseases such as Optic Atrophy which includes Hereditary Optic Atrophy, Optic Disk Drusen, Optic Neuritis such as Neuromyelitis Optica, Papilledema, Trigeminal Neuralgia, Vocal Cord Paralysis, Demyelinating Diseases such as Neuromyelitis Optica and Swayback, and Diabetic neuropathies such as diabetic foot.

[0701] Additional neurologic diseases which can be treated or detected with polynucleotides, polypeptides, agonists, and/or antagonists of the present invention include nerve compression syndromes such as carpal tunnel syndrome, tarsal tunnel syndrome, thoracic outlet syndrome such as cervical rib syndrome, ulnar nerve compression syndrome, neuralgia such as causalgia, cervico-brachial neuralgia, facial neuralgia and trigeminal neuralgia, neuritis such as experimental allergic neuritis, optic neuritis, polyneuritis, polyradiculoneuritis and radiculities such as polyradiculitis, hereditary motor and sensory neuropathies such as Charcot-Marie Disease, Hereditary Optic Atrophy, Refsum's Disease, Hereditary Spastic Paraplegia and Werdnig-Hoffmann Disease, Hereditary Sensory and Autonomic Neuropathies which include Congenital Analgesia and Familial Dysautonomia, POEMS Syndrome, Sciatica, Gustatory Sweating and Tetany).

[0702] Endocrine Disorders

[0703] Polynucleotides or polypeptides, or agonists or antagonists of the present invention, may be used to treat, prevent, diagnose, and/or prognose disorders and/or diseases related to hormone imbalance, and/or disorders or diseases of the endocrine system.

[0704] Hormones secreted by the glands of the endocrine system control physical growth, sexual function, metabolism, and other functions. Disorders may be classified in two ways: disturbances in the production of hormones, and the inability of tissues to respond to hormones. The etiology of these hormone imbalance or endocrine system diseases, disorders or conditions may be genetic, somatic, such as cancer and some autoimmune diseases, acquired (e.g., by chemotherapy, injury or toxins), or infectious. Moreover, polynucleotides, polypeptides, antibodies, and/or agonists or antagonists of the present invention can be used as a marker or detector of a particular disease or disorder related to the endocrine system and/or hormone imbalance.

[0705] Endocrine system and/or hormone imbalance and/or diseases encompass disorders of uterine motility including, but not limited to: complications with pregnancy and labor (e.g., pre-term labor, post-term pregnancy, spontaneous abortion, and slow or stopped labor); and disorders and/or diseases of the menstrual cycle (e.g., dysmenorrhea and endometriosis).

[0706] Endocrine system and/or hormone imbalance disorders and/or diseases include disorders and/or diseases of the pancreas, such as, for example, diabetes mellitus, diabetes insipidus, congenital pancreatic agenesis, pheochromocytoma—islet cell tumor syndrome; disorders and/or diseases of the adrenal glands such as, for example, Addison's Disease, corticosteroid deficiency, virilizing disease, hirsutism, Cushing's Syndrome, hyperaldosteronism, pheochromocytoma; disorders and/or diseases of the pituitary gland, such as, for example, hyperpituitarism, hypopituitarism, pituitary dwarfism, pituitary adenoma, panhypopituitarism, acromegaly, gigantism; disorders and/or diseases of the thyroid, including but not limited to, hyperthyroidism, hypothyroidism, Plummer's disease, Graves' disease (toxic diffuse goiter), toxic nodular goiter, thyroiditis (Hashimoto's thyroiditis, subacute granulomatous thyroiditis, and silent lymphocytic thyroiditis), Pendred's syndrome, myxedema, cretinism, thyrotoxicosis, thyroid hormone coupling defect, thymic aplasia, Hurthle cell tumours of the thyroid, thyroid cancer, thyroid carcinoma, Medullary thyroid carcinoma; disorders and/or diseases of the parathyroid, such as, for example, hyperparathyroidism, hypoparathyroidism; disorders and/or diseases of the hypothalamus.

[0707] In addition, endocrine system and/or hormone imbalance disorders and/or diseases may also include disorders and/or diseases of the testes or ovaries, including cancer. Other disorders and/or diseases of the testes or ovaries further include, for example, ovarian cancer, polycystic ovary syndrome, Klinefelter's syndrome, vanishing testes syndrome (bilateral anorchia), congenital absence of Leydig's cells, cryptorchidism, Noonan's syndrome, myotonic dystrophy, capillary haemangioma of the testis (benign), neoplasias of the testis and neo-testis.

[0708] Moreover, endocrine system and/or hormone imbalance disorders and/or diseases may also include disorders and/or diseases such as, for example, polyglandular deficiency syndromes, pheochromocytoma, neuroblastoma, multiple Endocrine neoplasia, and disorders and/or cancers of endocrine tissues.

[0709] In another embodiment, a polypeptide of the invention, or polynucleotides, antibodies, agonists, or antagonists corresponding to that polypeptide, may be used to diagnose, prognose, prevent, and/or treat endocrine diseases and/or disorders associated with the tissue(s) in which the polypeptide of the invention is expressed, including one, two, three, four, five, or more tissues disclosed in Table 1A, column 8 (Tissue Distribution Library Code).

[0710] Reproductive System Disorders

[0711] The polynucleotides or polypeptides, or agonists or antagonists of the invention may be used for the diagnosis, treatment, or prevention of diseases and/or disorders of the reproductive system. Reproductive system disorders that can be treated by the compositions of the invention, include, but are not limited to, reproductive system injuries, infections, neoplastic disorders, congenital defects, and diseases or disorders which result in infertility, complications with pregnancy, labor, or parturition, and postpartum difficulties.

[0712] Reproductive system disorders and/or diseases include diseases and/or disorders of the testes, including testicular atrophy, testicular feminization, cryptorchism (unilateral and bilateral), anorchia, ectopic testis, epididymitis and orchitis (typically resulting from infections such as, for example, gonorrhea, mumps, tuberculosis, and syphilis), testicular torsion, vasitis nodosa, germ cell tumors (e.g., seminomas, embryonal cell carcinomas, teratocarcinomas, choriocarcinomas, yolk sac tumors, and teratomas), stromal tumors (e.g., Leydig cell tumors), hydrocele, hematocele, varicocele, spermatocele, inguinal hernia, and disorders of sperm production (e.g., immotile cilia syndrome, aspermia, asthenozoospermia, azoospermia, oligospermia, and teratozoospermia).

[0713] Reproductive system disorders also include disorders of the prostate gland, such as acute non-bacterial prostatitis, chronic non-bacterial prostatitis, acute bacterial prostatitis, chronic bacterial prostatitis, prostatodystonia, prostatosis, granulomatous prostatitis, malacoplakia, benign prostatic hypertrophy or hyperplasia, and prostate neoplastic disorders, including adenocarcinomas, transitional cell carcinomas, ductal carcinomas, and squamous cell carcinomas.

[0714] Additionally, the compositions of the invention may be useful in the diagnosis, treatment, and/or prevention of disorders or diseases of the penis and urethra, including inflammatory disorders, such as balanoposthitis, balanitis xerotica obliterans, phimosis, paraphimosis, syphilis, herpes simplex virus, gonorrhea, non-gonococcal urethritis, chlamydia, mycoplasma, trichomonas, HIV, AIDS, Reiter's syndrome, condyloma acuminatum, condyloma latum, and pearly penile papules; urethral abnormalities, such as hypospadias, epispadias, and phimosis; premalignant lesions, including Erythroplasia of Queyrat, Bowen's disease, Bowenoid paplosis, giant condyloma of Buscke-Lowenstein, and varrucous carcinoma; penile cancers, including squamous cell carcinomas, carcinoma in situ, verrucous carcinoma, and disseminated penile carcinoma; urethral neoplastic disorders, including penile urethral carcinoma, bulbomembranous urethral carcinoma, and prostatic urethral carcinoma; and erectile disorders, such as priapism, Peyronie's disease, erectile dysfunction, and impotence.

[0715] Moreover, diseases and/or disorders of the vas deferens include vasculititis and CBAVD (congenital bilateral absence of the vas deferens); additionally, the polynucleotides, polypeptides, and agonists or antagonists of the present invention may be used in the diagnosis, treatment, and/or prevention of diseases and/or disorders of the seminal vesicles, including hydatid disease, congenital chloride diarrhea, and polycystic kidney disease.

[0716] Other disorders and/or diseases of the male reproductive system include, for example, Klinefelter's syndrome, Young's syndrome, premature ejaculation, diabetes mellitus, cystic fibrosis, Kartagener's syndrome, high fever, multiple sclerosis, and gynecomastia.

[0717] Further, the polynucleotides, polypeptides, and agonists or antagonists of the present invention may be used in the diagnosis, treatment, and/or prevention of diseases and/or disorders of the vagina and vulva, including bacterial vaginosis, candida vaginitis, herpes simplex virus, chancroid, granuloma inguinale, lymphogranuloma venereum, scabies, human papillomavirus, vaginal trauma, vulvar trauma, adenosis, chlamydia vaginitis, gonorrhea, trichomonas vaginitis, condyloma acuminatum, syphilis, molluscum contagiosum, atrophic vaginitis, Paget's disease, lichen sclerosus, lichen planus, vulvodynia, toxic shock syndrome, vaginismus, vulvovaginitis, vulvar vestibulitis, and neoplastic disorders, such as squamous cell hyperplasia, clear cell carcinoma, basal cell carcinoma, melanomas, cancer of Bartholin's gland, and vulvar intraepithelial neoplasia.

[0718] Disorders and/or diseases of the uterus include dysmenorrhea, retroverted uterus, endometriosis, fibroids, adenomyosis, anovulatory bleeding, amenorrhea, Cushing's syndrome, hydatidiform moles, Asherman's syndrome, premature menopause, precocious puberty, uterine polyps, dysfunctional uterine bleeding (e.g., due to aberrant hormonal signals), and neoplastic disorders, such as adenocarcinomas, keiomyosarcomas, and sarcomas. Additionally, the polypeptides, polynucleotides, or agonists or antagonists of the invention may be useful as a marker or detector of, as well as in the diagnosis, treatment, and/or prevention of congenital uterine abnormalities, such as bicornuate uterus, septate uterus, simple unicornuate uterus, uniconjuate uterus with a noncavitary rudimentary horn, unicornuate uterus with a non-communicating cavitary rudimentary horn, unicornuate uterus with a communicating cavitary horn, arcuate uterus, uterine didelfus, and T-shaped uterus.

[0719] Ovarian diseases and/or disorders include anovulation, polycystic ovary syndrome (Stein-Leventhal syndrome), ovarian cysts, ovarian hypofunction, ovarian insensitivity to gonadotropins, ovarian overproduction of androgens, right ovarian vein syndrome, amenorrhea, hirutism, and ovarian cancer (including, but not limited to, primary and secondary cancerous growth, Sertoli-Leydig tumors, endometriod carcinoma of the ovary, ovarian papillary serous adenocarcinoma, ovarian mucinous adenocarcinoma, and Ovarian Krukenberg tumors).

[0720] Cervical diseases and/or disorders include cervicitis, chronic cervicitis, mucopurulent cervicitis, cervical dysplasia, cervical polyps, Nabothian cysts, cervical erosion, cervical incompetence, and cervical neoplasms (including, for example, cervical carcinoma, squamous metaplasia, squamous cell carcinoma, adenosquamous cell neoplasia, and columnar cell neoplasia).

[0721] Additionally, diseases and/or disorders of the reproductive system include disorders and/or diseases of pregnancy, including miscarriage and stillbirth, such as early abortion, late abortion, spontaneous abortion, induced abortion, therapeutic abortion, threatened abortion, missed abortion, incomplete abortion, complete abortion, habitual abortion, missed abortion, and septic abortion; ectopic pregnancy, anemia, Rh incompatibility, vaginal bleeding during pregnancy, gestational diabetes, intrauterine growth retardation, polyhydramnios, HELLP syndrome, abruptio placentae, placenta previa, hyperemesis, preeclampsia, eclampsia, herpes gestationis, and urticaria of pregnancy. Additionally, the polynucleotides, polypeptides, and agonists or antagonists of the present invention may be used in the diagnosis, treatment, and/or prevention of diseases that can complicate pregnancy, including heart disease, heart failure, rheumatic heart disease, congenital heart disease, mitral valve prolapse, high blood pressure, anemia, kidney disease, infectious disease (e.g., rubella, cytomegalovirus, toxoplasmosis, infectious hepatitis, chlamydia, HIV, AIDS, and genital herpes), diabetes mellitus, Graves' disease, thyroiditis, hypothyroidism, Hashimoto's thyroiditis, chronic active hepatitis, cirrhosis of the liver, primary biliary cirrhosis, asthma, systemic lupus eryematosis, rheumatoid arthritis, myasthenia gravis, idiopathic thrombocytopenic purpura, appendicitis, ovarian cysts, gallbladder disorders,and obstruction of the intestine.

[0722] Complications associated with labor and parturition include premature rupture of the membranes, pre-term labor, post-term pregnancy, postmaturity, labor that progresses too slowly, fetal distress (e.g., abnormal heart rate (fetal or maternal), breathing problems, and abnormal fetal position), shoulder dystocia, prolapsed umbilical cord, amniotic fluid embolism, and aberrant uterine bleeding. 16841 Further, diseases and/or disorders of the postdelivery period, including endometritis, myometritis, parametritis, peritonitis, pelvic thrombophlebitis, pulmonary embolism, endotoxemia, pyelonephritis, saphenous thrombophlebitis, mastitis, cystitis, postpartum hemorrhage, and inverted uterus.

[0723] Other disorders and/or diseases of the female reproductive system that may be diagnosed, treated, and/or prevented by the polynucleotides, polypeptides, and agonists or antagonists of the present invention include, for example, Turner's syndrome, pseudohermaphroditism, premenstrual syndrome, pelvic inflammatory disease, pelvic congestion (vascular engorgement), frigidity, anorgasmia, dyspareunia, ruptured fallopian tube, and Mittelschmerz.

[0724] Infectious Disease

[0725] Polynucleotides or polypeptides, as well as agonists or antagonists of the present invention can be used to treat or detect infectious agents. For example, by increasing the immune response, particularly increasing the proliferation and differentiation of B and/or T cells, infectious diseases may be treated. The immune response may be increased by either enhancing an existing immune response, or by initiating a new immune response. Alternatively, polynucleotides or polypeptides, as well as agonists or antagonists of the present invention may also directly inhibit the infectious agent, without necessarily eliciting an immune response.

[0726] Viruses are one example of an infectious agent that can cause disease or symptoms that can be treated or detected by a polynucleotide or polypeptide and/or agonist or antagonist of the present invention. Examples of viruses, include, but are not limited to Examples of viruses, include, but are not limited to the following DNA and RNA viruses and viral families: Arbovirus, Adenoviridae, Arenaviridae, Arterivirus, Bimaviridae, Bunyaviridae, Caliciviridae, Circoviridae, Coronaviridae, Dengue, EBV, HIV, Flaviviridae, Hepadnaviridae (Hepatitis), Herpesviridae (such as, Cytomegalovirus, Herpes Simplex, Herpes Zoster), Mononegavirus (e.g., Paramyxoviridae, Morbillivirus, Rhabdoviridae), Orthomyxoviridae (e.g., Influenza A, Influenza B, and parainfluenza), Papiloma virus, Papovaviridae, Parvoviridae, Picomaviridae, Poxviridae (such as Smallpox or Vaccinia), Reoviridae (e.g., Rotavirus), Retroviridae (HTLV-I, HTLV-II, Lentivirus), and Togaviridae (e.g., Rubivirus). Viruses falling within these families can cause a variety of diseases or symptoms, including, but not limited to: arthritis, bronchiollitis, respiratory syncytial virus, encephalitis, eye infections (e.g., conjunctivitis, keratitis), chronic fatigue syndrome, hepatitis (A, B, C, E, Chronic Active, Delta), Japanese B encephalitis, Junin, Chikungunya, Rift Valley fever, yellow fever, meningitis, opportunistic infections (e.g., AIDS), pneumonia, Burkitt's Lymphoma, chickenpox, hemorrhagic fever, Measles, Mumps, Parainfluenza, Rabies, the common cold, Polio, leukemia, Rubella, sexually transmitted diseases, skin diseases (e.g., Kaposi's, warts), and viremia. polynucleotides or polypeptides, or agonists or antagonists of the invention, can be used to treat or detect any of these symptoms or diseases. In specific embodiments, polynucleotides, polypeptides, or agonists or antagonists of the invention are used to treat: meningitis, Dengue, EBV, and/or hepatitis (e.g., hepatitis B). In an additional specific embodiment polynucleotides, polypeptides, or agonists or antagonists of the invention are used to treat patients nonresponsive to one or more other commercially available hepatitis vaccines. In a further specific embodiment polynucleotides, polypeptides, or agonists or antagonists of the invention are used to treat AIDS.

[0727] Similarly, bacterial and fungal agents that can cause disease or symptoms and that can be treated or detected by a polynucleotide or polypeptide and/or agonist or antagonist of the present invention include, but not limited to, the following Gram-Negative and Gram-positive bacteria, bacterial families, and fungi: Actinomyces (e.g., Norcardia), Acinetobacter, Cryptococcus neoformans, Aspergillus, Bacillaceae (e.g., Bacillus anthrasis), Bacteroides (e.g., Bacteroides fragilis), Blastomycosis, Bordetella, Borrelia (e.g., Borrelia burgdorferi), Brucella, Candidia, Campylobacter, Chlamydia, Clostridium (e.g., Clostridium botulinum, Clostridium dificile, Clostridium perfringens, Clostridium tetani), Coccidioides, Corynebacterium (e.g., Corynebacterium diptheriae), Cryptococcus, Dermatocycoses, E. coli (e.g., Enterotoxigenic E. coli and Enterohemorrhagic E. coli), Enterobacter (e.g. Enterobacter aerogenes), Enterobacteriaceae (Klebsiella, Salmonella (e.g., Salmonella typhi, Salmonella enteritidis, Salmonella typhi), Serratia, Yersinia, Shigella), Erysipelothrix, Haemophilus (e.g., Haemophilus influenza type B), Helicobacter, Legionella (e.g., Legionella pneumophila), Leptospira, Listeria (e.g., Listeria monocytogenes), Mycoplasma, Mycobacterium (e.g., Mycobacterium leprae and Mycobacterium tuberculosis), Vibrio (e.g., Vibrio cholerae), Neisseriaceae (e.g., Neisseria gonorrhea, Neisseria meningitidis), Pasteurellacea, Proteus, Pseudomonas (e.g., Pseudomonas aeruginosa), Rickettsiaceae, Spirochetes (e.g., Treponema spp., Leptospira spp., Borrelia spp.), Shigella spp., Staphylococcus (e.g., Staphylococcus aureus), Meningiococcus, Pneumococcus and Streptococcus (e.g., Streptococcus pneumoniae and Groups A, B, and C Streptococci), and Ureaplasmas. These bacterial, parasitic, and fungal families can cause diseases or symptoms, including, but not limited to: antibiotic-resistant infections, bacteremia, endocarditis, septicemia, eye infections (e.g., conjunctivitis), uveitis, tuberculosis, gingivitis, bacterial diarrhea, opportunistic infections (e.g., AIDS related infections), paronychia, prosthesis-related infections, dental caries, Reiter's Disease, respiratory tract infections, such as Whooping Cough or Empyema, sepsis, Lyme Disease, Cat-Scratch Disease, dysentery, paratyphoid fever, food poisoning, Legionella disease, chronic and acute inflammation, erythema, yeast infections, typhoid, pneumonia, gonorrhea, meningitis (e.g., mengitis types A and B), chlamydia, syphillis, diphtheria, leprosy, brucellosis, peptic ulcers, anthrax, spontaneous abortions, birth defects, pneumonia, lung infections, ear infections, deafness, blindness, lethargy, malaise, vomiting, chronic diarrhea, Crohn's disease, colitis, vaginosis, sterility, pelvic inflammatory diseases, candidiasis, paratuberculosis, tuberculosis, lupus, botulism, gangrene, tetanus, impetigo, Rheumatic Fever, Scarlet Fever, sexually transmitted diseases, skin diseases (e.g., cellulitis, dermatocycoses), toxemia, urinary tract infections, wound infections, noscomial infections. Polynucleotides or polypeptides, agonists or antagonists of the invention, can be used to treat or detect any of these symptoms or diseases. In specific embodiments, polynucleotides, polypeptides, agonists or antagonists of the invention are used to treat: tetanus, diptheria, botulism, and/or meningitis type B.

[0728] Moreover, parasitic agents causing disease or symptoms that can be treated, prevented, and/or diagnosed by a polynucleotide or polypeptide and/or agonist or antagonist of the present invention include, but not limited to, the following families or class: Amebiasis, Babesiosis, Coccidiosis, Cryptosporidiosis, Dientamoebiasis, Dourine, Ectoparasitic, Giardias, Helminthiasis, Leishmaniasis, Schistisoma, Theileriasis, Toxoplasmosis, Trypanosomiasis, and Trichomonas and Sporozoans (e.g., Plasmodium virax, Plasmodium falciparium, Plasmodium malariae and Plasmodium ovale). These parasites can cause a variety of diseases or symptoms, including, but not limited to: Scabies, Trombiculiasis, eye infections, intestinal disease (e.g., dysentery, giardiasis), liver disease, lung disease, opportunistic infections (e.g., AIDS related), malaria, pregnancy complications, and toxoplasmosis. polynucleotides or polypeptides, or agonists or antagonists of the invention, can be used to treat, prevent, and/or diagnose any of these symptoms or diseases. In specific embodiments, polynucleotides, polypeptides, or agonists or antagonists of the invention are used to treat, prevent, and/or diagnose malaria.

[0729] Polynucleotides or polypeptides, as well as agonists or antagonists of the present invention of the present invention could either be by administering an effective amount of a polypeptide to the patient, or by removing cells from the patient, supplying the cells with a polynucleotide of the present invention, and returning the engineered cells to the patient (ex vivo therapy). Moreover, the polypeptide or polynucleotide of the present invention can be used as an antigen in a vaccine to raise an immune response against infectious disease.

[0730] Regeneration

[0731] Polynucleotides or polypeptides, as well as agonists or antagonists of the present invention can be used to differentiate, proliferate, and attract cells, leading to the regeneration of tissues. (See, Science 276:59-87 (1997)). The regeneration of tissues could be used to repair, replace, or protect tissue damaged by congenital defects, trauma (wounds, bums, incisions, or ulcers), age, disease (e.g. osteoporosis, osteocarthritis, periodontal disease, liver failure), surgery, including cosmetic plastic surgery, fibrosis, reperfusion injury, or systemic cytokine damage.

[0732] Tissues that could be regenerated using the present invention include organs (e.g., pancreas, liver, intestine, kidney, skin, endothelium), muscle (smooth, skeletal or cardiac), vasculature (including vascular and lymphatics), nervous, hematopoietic, and skeletal (bone, cartilage, tendon, and ligament) tissue. Preferably, regeneration occurs without or decreased scarring. Regeneration also may include angiogenesis.

[0733] Moreover, polynucleotides or polypeptides, as well as agonists or antagonists of the present invention, may increase regeneration of tissues difficult to heal. For example, increased tendon/ligament regeneration would quicken recovery time after damage. Polynucleotides or polypeptides, as well as agonists or antagonists of the present invention could also be used prophylactically in an effort to avoid damage. Specific diseases that could be treated include of tendinitis, carpal tunnel syndrome, and other tendon or ligament defects. A further example of tissue regeneration of non-healing wounds includes pressure ulcers, ulcers associated with vascular insufficiency, surgical, and traumatic wounds.

[0734] Similarly, nerve and brain tissue could also be regenerated by using polynucleotides or polypeptides, as well as agonists or antagonists of the present invention, to proliferate and differentiate nerve cells. Diseases that could be treated using this method include central and peripheral nervous system diseases, neuropathies, or mechanical and traumatic disorders (e.g., spinal cord disorders, head trauma, cerebrovascular disease, and stoke). Specifically, diseases associated with peripheral nerve injuries, peripheral neuropathy (e.g., resulting from chemotherapy or other medical therapies), localized neuropathies, and central nervous system diseases (e.g., Alzheimer's disease, Parkinson's disease, Huntington's disease, amyotrophic lateral sclerosis, and Shy-Drager syndrome), could all be treated using the polynucleotides or polypeptides, as well as agonists or antagonists of the present invention.

[0735] Gastrointestinal Disorders

[0736] Polynucleotides or polypeptides, or agonists or antagonists of the present invention, may be used to treat, prevent, diagnose, and/or prognose gastrointestinal disorders, including inflammatory diseases and/or conditions, infections, cancers (e.g., intestinal neoplasms (carcinoid tumor of the small intestine, non-Hodgkin's lymphoma of the small intestine, small bowl lymphoma)), and ulcers, such as peptic ulcers.

[0737] Gastrointestinal disorders include dysphagia, odynophagia, inflammation of the esophagus, peptic esophagitis, gastric reflux, submucosal fibrosis and stricturing, Mallory-Weiss lesions, leiomyomas, lipomas, epidermal cancers, adeoncarcinomas, gastric retention disorders, gastroenteritis, gastric atrophy, gastric/stomach cancers, polyps of the stomach, autoimmune disorders such as pernicious anemia, pyloric stenosis, gastritis (bacterial, viral, eosinophilic, stress-induced, chronic erosive, atrophic, plasma cell, and Menetrier's), and peritoneal diseases (e.g., chyloperioneum, hemoperitoneum, mesenteric cyst, mesenteric lymphadenitis, mesenteric vascular occlusion, panniculitis, neoplasms, peritonitis, pneumoperitoneum, bubphrenic abscess,).

[0738] Gastrointestinal disorders also include disorders associated with the small intestine, such as malabsorption syndromes, distension, irritable bowel syndrome, sugar intolerance, celiac disease, duodenal ulcers, duodenitis, tropical sprue, Whipple's disease, intestinal lymphangiectasia, Crohn's disease, appendicitis, obstructions of the ileum, Meckel's diverticulum, multiple diverticula, failure of complete rotation of the small and large intestine, lymphoma, and bacterial and parasitic diseases (such as Traveler's diarrhea, typhoid and paratyphoid, cholera, infection by Roundworms (Ascariasis lumbricoides), Hookworms (Ancylostoma duodenale), Threadworms (Enterobius vermicularis), Tapeworms (Taenia saginata, Echinococcus granulosus, Diphyllobothrium spp., and T. solium).

[0739] Liver diseases and/or disorders include intrahepatic cholestasis (alagille syndrome, biliary liver cirrhosis), fatty liver (alcoholic fatty liver, reye syndrome), hepatic vein thrombosis, hepatolentricular degeneration, hepatomegaly, hepatopulmonary syndrome, hepatorenal syndrome, portal hypertension (esophageal and gastric varices), liver abscess (amebic liver abscess), liver cirrhosis (alcoholic, biliary and experimental), alcoholic liver diseases (fatty liver, hepatitis, cirrhosis), parasitic (hepatic echinococcosis, fascioliasis, amebic liver abscess), jaundice (hemolytic, hepatocellular, and cholestatic), cholestasis, portal hypertension, liver enlargement, ascites, hepatitis (alcoholic hepatitis, animal hepatitis, chronic hepatitis (autoimmune, hepatitis B, hepatitis C, hepatitis D, drug induced), toxic hepatitis, viral human hepatitis (hepatitis A, hepatitis B, hepatitis C, hepatitis D, hepatitis E), Wilson's disease, granulomatous hepatitis, secondary biliary cirrhosis, hepatic encephalopathy, portal hypertension, varices, hepatic encephalopathy, primary biliary cirrhosis, primary sclerosing cholangitis, hepatocellular adenoma, hemangiomas, bile stones, liver failure (hepatic encephalopathy, acute liver failure), and liver neoplasms (angiomyolipoma, calcified liver metastases, cystic liver metastases, epithelial tumors, fibrolamellar hepatocarcinoma, focal nodular hyperplasia, hepatic adenoma, hepatobiliary cystadenoma, hepatoblastoma, hepatocellular carcinoma, hepatoma, liver cancer, liver hemangioendothelioma, mesenchymal hamartoma, mesenchymal tumors of liver, nodular regenerative hyperplasia, benign liver tumors (Hepatic cysts [Simple cysts, Polycystic liver disease, Hepatobiliary cystadenoma, Choledochal cyst], Mesenchymal tumors [Mesenchymal hamartoma, Infantile hemangioendothelioma, Hemangioma, Peliosis hepatis, Lipomas, Inflammatory pseudotumor, Miscellaneous], Epithelial tumors [Bile duct epithelium (Bile duct hamartoma, Bile duct adenoma), Hepatocyte (Adenoma, Focal nodular hyperplasia, Nodular regenerative hyperplasia)], malignant liver tumors [hepatocellular, hepatoblastoma, hepatocellular carcinoma, cholangiocellular, cholangiocarcinoma, cystadenocarcinoma, tumors of blood vessels, angiosarcoma, Karposi's sarcoma, hemangioendothelioma, other tumors, embryonal sarcoma, fibrosarcoma, leiomyosarcoma, rhabdomyosarcoma, carcinosarcoma, teratoma, carcinoid, squamous carcinoma, primary lymphoma]), peliosis hepatis, erythrohepatic porphyria, hepatic porphyria (acute intermittent porphyria, porphyria cutanea tarda), Zellweger syndrome).

[0740] Pancreatic diseases and/or disorders include acute pancreatitis, chronic pancreatitis (acute necrotizing pancreatitis, alcoholic pancreatitis), neoplasms (adenocarcinoma of the pancreas, cystadenocarcinoma, insulinoma, gastrinoma, and glucagonoma, cystic neoplasms, islet-cell tumors, pancreoblastoma), and other pancreatic diseases (e.g., cystic fibrosis, cyst (pancreatic pseudocyst, pancreatic fistula, insufficiency)).

[0741] Gallbladder diseases include gallstones (cholelithiasis and choledocholithiasis), postcholecystectomy syndrome, diverticulosis of the gallbladder, acute cholecystitis, chronic cholecystitis, bile duct tumors, and mucocele.

[0742] Diseases and/or disorders of the large intestine include antibiotic-associated colitis, diverticulitis, ulcerative colitis, acquired megacolon, abscesses, fungal and bacterial infections, anorectal disorders (e.g., fissures, hemorrhoids), colonic diseases (colitis, colonic neoplasms [colon cancer, adenomatous colon polyps (e.g., villous adenoma), colon carcinoma, colorectal cancer], colonic diverticulitis, colonic diverticulosis, megacolon [Hirschsprung disease, toxic megacolon]; sigmoid diseases [proctocolitis, sigmoin neoplasms]), constipation, Crohn's disease, diarrhea (infantile diarrhea, dysentery), duodenal diseases (duodenal neoplasms, duodenal obstruction, duodenal ulcer, duodenitis), enteritis (enterocolitis), HIV enteropathy, ileal diseases (ileal neoplasms, ileitis), immunoproliferative small intestinal disease, inflammatory bowel disease (ulcerative colitis, Crohn's disease), intestinal atresia, parasitic diseases (anisakiasis, balantidiasis, blastocystis infections, cryptosporidiosis, dientamoebiasis, amebic dysentery, giardiasis), intestinal fistula (rectal fistula), intestinal neoplasms (cecal neoplasms, colonic neoplasms, duodenal neoplasms, ileal neoplasms, intestinal polyps, jejunal neoplasms, rectal neoplasms), intestinal obstruction (afferent loop syndrome, duodenal obstruction, impacted feces, intestinal pseudo-obstruction [cecal volvulus], intussusception), intestinal perforation, intestinal polyps (colonic polyps, gardner syndrome, peutz-jeghers syndrome), jejunal diseases (jejunal neoplasms), malabsorption syndromes (blind loop syndrome, celiac disease, lactose intolerance, short bowl syndrome, tropical sprue, whipple's disease), mesenteric vascular occlusion, pneumatosis cystoides intestinalis, protein-losing enteropathies (intestinal lymphagiectasis), rectal diseases (anus diseases, fecal incontinence, hemorrhoids, proctitis, rectal fistula, rectal prolapse, rectocele), peptic ulcer (duodenal ulcer, peptic esophagitis, hemorrhage, perforation, stomach ulcer, Zollinger-Ellison syndrome), postgastrectomy syndromes (dumping syndrome), stomach diseases (e.g., achlorhydria, duodenogastric reflux (bile reflux), gastric antral vascular ectasia, gastric fistula, gastric outlet obstruction, gastritis (atrophic or hypertrophic), gastroparesis, stomach dilatation, stomach diverticulum, stomach neoplasms (gastric cancer, gastric polyps, gastric adenocarcinoma, hyperplastic gastric polyp), stomach rupture, stomach ulcer, stomach volvulus), tuberculosis, visceroptosis, vomiting (e.g., hematemesis, hyperemesis gravidarum, postoperative nausea and vomiting) and hemorrhagic colitis.

[0743] Further diseases and/or disorders of the gastrointestinal system include biliary tract diseases, such as, gastroschisis, fistula (e.g., biliary fistula, esophageal fistula, gastric fistula, intestinal fistula, pancreatic fistula), neoplasms (e.g., biliary tract neoplasms, esophageal neoplasms, such as adenocarcinoma of the esophagus, esophageal squamous cell carcinoma, gastrointestinal neoplasms, pancreatic neoplasms, such as adenocarcinoma of the pancreas, mucinous cystic neoplasm of the pancreas, pancreatic cystic neoplasms, pancreatoblastoma, and peritoneal neoplasms), esophageal disease (e.g., bullous diseases, candidiasis, glycogenic acanthosis, ulceration, barrett esophagus varices, atresia, cyst, diverticulum (e.g., Zenker's diverticulum), fistula (e.g., tracheoesophageal fistula), motility disorders (e.g., CREST syndrome, deglutition disorders, achalasia, spasm, gastroesophageal reflux), neoplasms, perforation (e.g., Boerhaave syndrome, Mallory-Weiss syndrome), stenosis, esophagitis, diaphragmatic hernia (e.g., hiatal hernia); gastrointestinal diseases, such as, gastroenteritis (e.g., cholera morbus, norwalk virus infection), hemorrhage (e.g., hematemesis, melena, peptic ulcer hemorrhage), stomach neoplasms (gastric cancer, gastric polyps, gastric adenocarcinoma, stomach cancer)), hernia (e.g., congenital diaphragmatic hernia, femoral hernia, inguinal hernia, obturator hernia, umbilical hernia, ventral hernia), and intestinal diseases (e.g., cecal diseases (appendicitis, cecal neoplasms)).

[0744] Chemotaxis

[0745] Polynucleotides or polypeptides, as well as agonists or antagonists of the present invention may have chemotaxis activity. A chemotaxic molecule attracts or mobilizes cells (e.g., monocytes, fibroblasts, neutrophils, T-cells, mast cells, eosinophils, epithelial and/or endothelial cells) to a particular site in the body, such as inflammation, infection, or site of hyperproliferation. The mobilized cells can then fight off and/or heal the particular trauma or abnormality.

[0746] Polynucleotides or polypeptides, as well as agonists or antagonists of the present invention may increase chemotaxic activity of particular cells. These chemotactic molecules can then be used to treat inflammation, infection, hyperproliferative disorders, or any immune system disorder by increasing the number of cells targeted to a particular location in the body. For example, chemotaxic molecules can be used to treat wounds and other trauma to tissues by attracting immune cells to the injured location. Chemotactic molecules of the present invention can also attract fibroblasts, which can be used to treat wounds.

[0747] It is also contemplated that polynucleotides or polypeptides, as well as agonists or antagonists of the present invention may inhibit chemotactic activity. These molecules could also be used to treat disorders. Thus, polynucleotides or polypeptides, as well as agonists or antagonists of the present invention could be used as an inhibitor of chemotaxis.

[0748] Binding Activity

[0749] A polypeptide of the present invention may be used to screen for molecules that bind to the polypeptide or for molecules to which the polypeptide binds. The binding of the polypeptide and the molecule may activate (agonist), increase, inhibit (antagonist), or decrease activity of the polypeptide or the molecule bound. Examples of such molecules include antibodies, oligonucleotides, proteins (e.g., receptors),or small molecules.

[0750] Preferably, the molecule is closely related to the natural ligand of the polypeptide, e.g., a fragment of the ligand, or a natural substrate, a ligand, a structural or functional mimetic. (See, Coligan et al., Current Protocols in Immunology 1(2):Chapter 5 (1991)). Similarly, the molecule can be closely related to the natural receptor to which the polypeptide binds, or at least, a fragment of the receptor capable of being bound by the polypeptide (e.g., active site). In either case, the molecule can be rationally designed using known techniques.

[0751] Preferably, the screening for these molecules involves producing appropriate cells which express the polypeptide. Preferred cells include cells from mammals, yeast, Drosophila, or E. coli. Cells expressing the polypeptide (or cell membrane containing the expressed polypeptide) are then preferably contacted with a test compound potentially containing the molecule to observe binding, stimulation, or inhibition of activity of either the polypeptide or the molecule.

[0752] The assay may simply test binding of a candidate compound to the polypeptide, wherein binding is detected by a label, or in an assay involving competition with a labeled competitor. Further, the assay may test whether the candidate compound results in a signal generated by binding to the polypeptide.

[0753] Alternatively, the assay can be carried out using cell-free preparations, polypeptide/molecule affixed to a solid support, chemical libraries, or natural product mixtures. The assay may also simply comprise the steps of mixing a candidate compound with a solution containing a polypeptide, measuring polypeptide/molecule activity or binding, and comparing the polypeptide/molecule activity or binding to a standard.

[0754] Preferably, an ELISA assay can measure polypeptide level or activity in a sample (e.g., biological sample) using a monoclonal or polyclonal antibody. The antibody can measure polypeptide level or activity by either binding, directly or indirectly, to the polypeptide or by competing with the polypeptide for a substrate.

[0755] Additionally, the receptor to which the polypeptide of the present invention binds can be identified by numerous methods known to those of skill in the art, for example, ligand panning and FACS sorting (Coligan, et al., Current Protocols in Immun., 1(2), Chapter 5, (1991)). For example, expression cloning is employed wherein polyadenylated RNA is prepared from a cell responsive to the polypeptides, for example, NIH3T3 cells which are known to contain multiple receptors for the FGF family proteins, and SC-3 cells, and a cDNA library created from this RNA is divided into pools and used to transfect COS cells or other cells that are not responsive to the polypeptides. Transfected cells which are grown on glass slides are exposed to the polypeptide of the present invention, after they have been labeled. The polypeptides can be labeled by a variety of means including iodination or inclusion of a recognition site for a site-specific protein kinase.

[0756] Following fixation and incubation, the slides are subjected to auto-radiographic analysis. Positive pools are identified and sub-pools are prepared and re-transfected using an iterative sub-pooling and re-screening process, eventually yielding a single clones that encodes the putative receptor.

[0757] As an alternative approach for receptor identification, the labeled polypeptides can be photoaffinity linked with cell membrane or extract preparations that express the receptor molecule. Cross-linked material is resolved by PAGE analysis and exposed to X-ray film. The labeled complex containing the receptors of the polypeptides can be excised, resolved into peptide fragments, and subjected to protein microsequencing. The amino acid sequence obtained from microsequencing would be used to design a set of degenerate oligonucleotide probes to screen a cDNA library to identify the genes encoding the putative receptors.

[0758] Moreover, the techniques of gene-shuffling, motif-shuffling, exon-shuffling, and/or codon-shuffling (collectively referred to as “DNA shuffling”) may be employed to modulate the activities of the polypeptide of the present invention thereby effectively generating agonists and antagonists of the polypeptide of the present invention. See generally, U.S. Pat. Nos. 5,605,793, 5,811,238, 5,830,721, 5,834,252, and 5,837,458, and Patten, P. A., et al, Curr. Opinion Biotechnol. 8:724-33 (1997); Harayama, S. Trends Biotechnol. 16(2):76-82 (1998); Hansson, L. O., et al., J. Mol. Biol. 287:265-76 (1999); and Lorenzo, M. M. and Blasco, R. Biotechniques 24(2):308-13 (1998); each of these patents and publications are hereby incorporated by reference). In one embodiment, alteration of polynucleotides and corresponding polypeptides may be achieved by DNA shuffling. DNA shuffling involves the assembly of two or more DNA segments into a desired molecule by homologous, or site-specific, recombination. In another embodiment, polynucleotides and corresponding polypeptides may be altered by being subjected to random mutagenesis by error-prone PCR, random nucleotide insertion or other methods prior to recombination. In another embodiment, one or more components, motifs, sections, parts, domains, fragments, etc., of the polypeptide of the present invention may be recombined with one or more components, motifs, sections, parts, domains, fragments, etc. of one or more heterologous molecules. In preferred embodiments, the heterologous molecules are family members. In further preferred embodiments, the heterologous molecule is a growth factor such as, for example, platelet-derived growth factor (PDGF), insulin-like growth factor (IGF-I), transforming growth factor (TGF)-alpha, epidermal growth factor (EGF), fibroblast growth factor (FGF), TGF-beta, bone morphogenetic protein (BMP)-2, BMP-4, BMP-5, BMP-6, BMP-7, activins A and B, decapentaplegic(dpp), 60A, OP-2, dorsalin, growth differentiation factors (GDFs), nodal, MIS, inhibin-alpha, TGF-betal, TGF-beta2, TGF-beta3, TGF-beta5, and glial-derived neurotrophic factor (GDNF).

[0759] Other preferred fragments are biologically active fragments of the polypeptide of the present invention. Biologically active fragments are those exhibiting activity similar, but not necessarily identical, to an activity of the polypeptide of the present invention. The biological activity of the fragments may include an improved desired activity, or a decreased undesirable activity.

[0760] Additionally, this invention provides a method of screening compounds to identify those which modulate the action of the polypeptide of the present invention. An example of such an assay comprises combining a mammalian fibroblast cell, a the polypeptide of the present invention, the compound to be screened and ³[H] thymidine under cell culture conditions where the fibroblast cell would normally proliferate. A control assay may be performed in the absence of the compound to be screened and compared to the amount of fibroblast proliferation in the presence of the compound to determine if the compound stimulates proliferation by determining the uptake of ³[H] thymidine in each case. The amount of fibroblast cell proliferation is measured by liquid scintillation chromatography which measures the incorporation of ³[H] thymidine. Both agonist and antagonist compounds may be identified by this procedure.

[0761] In another method, a mammalian cell or membrane preparation expressing a receptor for a polypeptide of the present invention is incubated with a labeled polypeptide of the present invention in the presence of the compound. The ability of the compound to enhance or block this interaction could then be measured. Alternatively, the response of a known second messenger system following interaction of a compound to be screened and the receptor is measured and the ability of the compound to bind to the receptor and elicit a second messenger response is measured to determine if the compound is a potential agonist or antagonist. Such second messenger systems include but are not limited to, cAMP guanylate cyclase, ion channels or phosphoinositide hydrolysis.

[0762] All of these above assays can be used as diagnostic or prognostic markers. The molecules discovered using these assays can be used to treat disease or to bring about a particular result in a patient (e.g., blood vessel growth) by activating or inhibiting the polypeptide/molecule. Moreover, the assays can discover agents which may inhibit or enhance the production of the polypeptides of the invention from suitably manipulated cells or tissues.

[0763] Therefore, the invention includes a method of identifying compounds which bind to a polypeptide of the invention comprising the steps of: (a) incubating a candidate binding compound with a polypeptide of the present invention; and (b) determining if binding has occurred. Moreover, the invention includes a method of identifying agonists/antagonists comprising the steps of: (a) incubating a candidate compound with a polypeptide of the present invention, (b) assaying a biological activity, and (b) determining if a biological activity of the polypeptide has been altered.

[0764] Targeted Delivery

[0765] In another embodiment, the invention provides a method of delivering compositions to targeted cells expressing a receptor for a polypeptide of the invention, or cells expressing a cell bound form of a polypeptide of the invention.

[0766] As discussed herein, polypeptides or antibodies of the invention may be associated with heterologous polypeptides, heterologous nucleic acids, toxins, or prodrugs via hydrophobic, hydrophilic, ionic and/or covalent interactions. In one embodiment, the invention provides a method for the specific delivery of compositions of the invention to cells by administering polypeptides of the invention (including antibodies) that are associated with heterologous polypeptides or nucleic acids. In one example, the invention provides a method for delivering a therapeutic protein into the targeted cell. In another example, the invention provides a method for delivering a single stranded nucleic acid (e.g., antisense or ribozymes) or double stranded nucleic acid (e.g., DNA that can integrate into the cell's genome or replicate episomally and that can be transcribed) into the targeted cell.

[0767] In another embodiment, the invention provides a method for the specific destruction of cells (e.g., the destruction of tumor cells) by administering polypeptides of the invention (e.g., polypeptides of the invention or antibodies of the invention) in association with toxins or cytotoxic prodrugs.

[0768] By “toxin” is meant compounds that bind and activate endogenous cytotoxic effector systems, radioisotopes, holotoxins, modified toxins, catalytic subunits of toxins, or any molecules or enzymes not normally present in or on the surface of a cell that under defined conditions cause the cell's death. Toxins that may be used according to the methods of the invention include, but are not limited to, radioisotopes known in the art, compounds such as, for example, antibodies (or complement fixing containing portions thereof) that bind an inherent or induced endogenous cytotoxic effector system, thymidine kinase, endonuclease, RNAse, alpha toxin, ricin, abrin, Pseudomonas exotoxin A, diphtheria toxin, saporin, momordin, gelonin, pokeweed antiviral protein, alpha-sarcin and cholera toxin. By “cytotoxic prodrug” is meant a non-toxic compound that is converted by an enzyme, normally present in the cell, into a cytotoxic compound. Cytotoxic prodrugs that may be used according to the methods of the invention include, but are not limited to, glutamyl derivatives of benzoic acid mustard alkylating agent, phosphate derivatives of etoposide or mitomycin C, cytosine arabinoside, daunorubisin, and phenoxyacetamide derivatives of doxorubicin.

[0769] Drug Screening

[0770] Further contemplated is the use of the polypeptides of the present invention, or the polynucleotides encoding these polypeptides, to screen for molecules which modify the activities of the polypeptides of the present invention. Such a method would include contacting the polypeptide of the present invention with a selected compound(s) suspected of having antagonist or agonist activity, and assaying the activity of these polypeptides following binding.

[0771] This invention is particularly useful for screening therapeutic compounds by using the polypeptides of the present invention, or binding fragments thereof, in any of a variety of drug screening techniques. The polypeptide or fragment employed in such a test may be affixed to a solid support, expressed on a cell surface, free in solution, or located intracellularly. One method of drug screening utilizes eukaryotic or prokaryotic host cells which are stably transformed with recombinant nucleic acids expressing the polypeptide or fragment. Drugs are screened against such transformed cells in competitive binding assays. One may measure, for example, the formulation of complexes between the agent being tested and a polypeptide of the present invention.

[0772] Thus, the present invention provides methods of screening for drugs or any other agents which affect activities mediated by the polypeptides of the present invention. These methods comprise contacting such an agent with a polypeptide of the present invention or a fragment thereof and assaying for the presence of a complex between the agent and the polypeptide or a fragment thereof, by methods well known in the art. In such a competitive binding assay, the agents to screen are typically labeled. Following incubation, free agent is separated from that present in bound form, and the amount of free or uncomplexed label is a measure of the ability of a particular agent to bind to the polypeptides of the present invention.

[0773] Another technique for drug screening provides high throughput screening for compounds having suitable binding affinity to the polypeptides of the present invention, and is described in great detail in European Patent Application 84/03564, published on September 13, 1984, which is incorporated herein by reference herein. Briefly stated, large numbers of different small peptide test compounds are synthesized on a solid substrate, such as plastic pins or some other surface. The peptide test compounds are reacted with polypeptides of the present invention and washed. Bound polypeptides are then detected by methods well known in the art. Purified polypeptides are coated directly onto plates for use in the aforementioned drug screening techniques. In addition, non-neutralizing antibodies may be used to capture the peptide and immobilize it on the solid support.

[0774] This invention also contemplates the use of competitive drug screening assays in which neutralizing antibodies capable of binding polypeptides of the present invention specifically compete with a test compound for binding to the polypeptides or fragments thereof. In this manner, the antibodies are used to detect the presence of any peptide which shares one or more antigenic epitopes with a polypeptide of the invention.

[0775] Antisense And Ribozyme (Antagonists)

[0776] In specific embodiments, antagonists according to the present invention are nucleic acids corresponding to the sequences contained in SEQ ID NO:X, or the complementary strand thereof, and/or to cDNA sequences contained in cDNA Clone ID NO:Z identified for example, in Table 1A. In one embodiment, antisense sequence is generated internally, by the organism, in another embodiment, the antisense sequence is separately administered (see, for example, O'Connor, J., Neurochem. 56:560 (1991). Oligodeoxynucleotides as Antisense Inhibitors of Gene Expression, CRC Press, Boca Raton, Fla. (1988). Antisense technology can be used to control gene expression through antisense DNA or RNA, or through triple-helix formation. Antisense techniques are discussed for example, in Okano, J., Neurochem. 56:560 (1991); Oligodeoxynucleotides as Antisense Inhibitors of Gene Expression, CRC Press, Boca Raton, Fla. (1988). Triple helix formation is discussed in, for instance, Lee et al., Nucleic Acids Research 6:3073 (1979); Cooney et al., Science 241:456 (1988); and Dervan et al., Science 251:1300 (1991). The methods are based on binding of a polynucleotide to a complementary DNA or RNA.

[0777] For example, the use of c-myc and c-myb antisense RNA constructs to inhibit the growth of the non-lymphocytic leukemia cell line HL-60 and other cell lines was previously described. (Wickstrom et al. (1988); Anfossi et al. (1989)). These experiments were performed in vitro by incubating cells with the oligoribonucleotide. A similar procedure for in vivo use is described in WO 91/15580. Briefly, a pair of oligonucleotides for a given antisense RNA is produced as follows: A sequence complimentary to the first 15 bases of the open reading frame is flanked by an EcoR1 site on the 5 end and a HindIII site on the 3 end. Next, the pair of oligonucleotides is heated at 90° C. for one minute and then annealed in 2× ligation buffer (20 mM TRIS HCl pH 7.5, 10 mM MgCl₂, 10 MM dithiothreitol (DTT) and 0.2 mM ATP) and then ligated to the EcoR1/HindIII site of the retroviral vector PMV7 (WO 91/15580).

[0778] For example, the 5′ coding portion of a polynucleotide that encodes the polypeptide of the present invention may be used to design an antisense RNA oligonucleotide of from about 10 to 40 base pairs in length. A DNA oligonucleotide is designed to be complementary to a region of the gene involved in transcription thereby preventing transcription and the production of the receptor. The antisense RNA oligonucleotide hybridizes to the mRNA in vivo and blocks translation of the mRNA molecule into receptor polypeptide.

[0779] In one embodiment, the antisense nucleic acid of the invention is produced intracellularly by transcription from an exogenous sequence. For example, a vector or a portion thereof, is transcribed, producing an antisense nucleic acid (RNA) of the invention. Such a vector would contain a sequence encoding the antisense nucleic acid. Such a vector can remain episomal or become chromosomally integrated, as long as it can be transcribed to produce the desired antisense RNA. Such vectors can be constructed by recombinant DNA technology methods standard in the art. Vectors can be plasmid, viral, or others known in the art, used for replication and expression in vertebrate cells. Expression of the sequence encoding the polypeptide of the present invention or fragments thereof, can be by any promoter known in the art to act in vertebrate, preferably human cells. Such promoters can be inducible or constitutive. Such promoters include, but are not limited to, the SV40 early promoter region (Bemoist and Chambon, Nature 29:304-310 (1981), the promoter contained in the 3′ long terminal repeat of Rous sarcoma virus (Yamamoto et al., Cell 22:787-797 (1980), the herpes thymidine promoter (Wagner et al., Proc. Natl. Acad. Sci. U.S.A. 78:1441-1445 (1981), the regulatory sequences of the metallothionein gene (Brinster, et al., Nature 296:39-42 (1982)), etc.

[0780] The antisense nucleic acids of the invention comprise a sequence complementary to at least a portion of an RNA transcript of a gene of the present invention. However, absolute complementarity, although preferred, is not required. A sequence “complementary to at least a portion of an RNA,” referred to herein, means a sequence having sufficient complementarity to be able to hybridize with the RNA, forming a stable duplex; in the case of double stranded antisense nucleic acids, a single strand of the duplex DNA may thus be tested, or triplex formation may be assayed. The ability to hybridize will depend on both the degree of complementarity and the length of the antisense nucleic acid. Generally, the larger the hybridizing nucleic acid, the more base mismatches with a RNA it may contain and still form a stable duplex (or triplex as the case may be). One skilled in the art can ascertain a tolerable degree of mismatch by use of standard procedures to determine the melting point of the hybridized complex.

[0781] Oligonucleotides that are complementary to the 5′ end of the message, e.g., the 5′ untranslated sequence up to and including the AUG initiation codon, should work most efficiently at inhibiting translation. However, sequences complementary to the 3′ untranslated sequences of mRNAs have been shown to be effective at inhibiting translation of mRNAs as well. See generally, Wagner, R., 1994, Nature 372:333-335. Thus, oligonucleotides complementary to either the 5′- or 3′- non- translated, non-coding regions of polynucleotide sequences described herein could be used in an antisense approach to inhibit translation of endogenous mRNA. Oligonucleotides complementary to the 5′ untranslated region of the mRNA should include the complement of the AUG start codon. Antisense oligonucleotides complementary to mRNA coding regions are less efficient inhibitors of translation but could be used in accordance with the invention. Whether designed to hybridize to the 5′-, 3′- or coding region of mRNA of the present invention, antisense nucleic acids should be at least six nucleotides in length, and are preferably oligonucleotides ranging from 6 to about 50 nucleotides in length. In specific aspects the oligonucleotide is at least 10 nucleotides, at least 17 nucleotides, at least 25 nucleotides or at least 50 nucleotides.

[0782] The polynucleotides of the invention can be DNA or RNA or chimeric mixtures or derivatives or modified versions thereof, single-stranded or double-stranded. The oligonucleotide can be modified at the base moiety, sugar moiety, or phosphate backbone, for example, to improve stability of the molecule, hybridization, etc. The oligonucleotide may include other appended groups such as peptides (e.g., for targeting host cell receptors in vivo), or agents facilitating transport across the cell membrane (see, e.g., Letsinger et al., 1989, Proc. Natl. Acad. Sci. U.S.A. 86:6553-6556; Lemaitre et al., 1987, Proc. Natl. Acad. Sci. 84:648-652; PCT Publication No. WO88/09810, published Dec. 15, 1988) or the blood-brain barrier (see, e.g., PCT Publication No. WO89/10134, published Apr. 25, 1988), hybridization-triggered cleavage agents. (See, e.g., Krol et al., 1988, BioTechniques 6:958-976) or intercalating agents. (See, e.g., Zon, 1988, Pharm. Res. 5:539-549). To this end, the oligonucleotide may be conjugated to another molecule, e.g., a peptide, hybridization triggered cross-linking agent, transport agent, hybridization-triggered cleavage agent, etc.

[0783] The antisense oligonucleotide may comprise at least one modified base moiety which is selected from the group including, but not limited to, 5-fluorouracil, 5-bromouracil, 5-chlorouracil, 5-iodouracil, hypoxanthine, xantine, 4-acetylcytosine, 5-(carboxyhydroxylmethyl) uracil, 5-carboxymethylaminomethyl-2-thiouridine, 5-carboxymethylaminomethyluracil, dihydrouracil, beta-D-galactosylqueosine, inosine, N6-isopentenyladenine, 1-methylguanine, 1-methylinosine, 2,2-dimethylguanine, 2-methyladenine, 2-methylguanine, 3-methylcytosine, 5-methylcytosine, N6-adenine, 7-methylguanine, 5-methylaminomethyluracil, 5-methoxyaminomethyl-2-thiouracil, beta-D-mannosylqueosine, 5′-methoxycarboxymethyluracil, 5-methoxyuracil, 2-methylthio-N6-isopentenyladenine, uracil-5-oxyacetic acid (v), wybutoxosine, pseudouracil, queosine, 2-thiocytosine, 5-methyl-2-thiouracil, 2-thiouracil, 4-thiouracil, 5-methyluracil, uracil-5-oxyacetic acid methylester, uracil-5-oxyacetic acid (v), 5-methyl-2-thiouracil, 3-(3-amino-3-N-2-carboxypropyl) uracil, (acp3)w, and 2,6-diaminopurine.

[0784] The antisense oligonucleotide may also comprise at least one modified sugar moiety selected from the group including, but not limited to, arabinose, 2-fluoroarabinose, xylulose, and hexose.

[0785] In yet another embodiment, the antisense oligonucleotide comprises at least one modified phosphate backbone selected from the group including, but not limited to, a phosphorothioate, a phosphorodithioate, a phosphoramidothioate, a phosphoramidate, a phosphordiamidate, a methylphosphonate, an alkyl phosphotriester, and a fornacetal or analog thereof.

[0786] In yet another embodiment, the antisense oligonucleotide is an a-anomeric oligonucleotide. An a-anomeric oligonucleotide forms specific double-stranded hybrids with complementary RNA in which, contrary to the usual b-units, the strands run parallel to each other (Gautier et al., 1987, Nucl. Acids Res. 15:6625-6641). The oligonucleotide is a 2′-0-methylribonucleotide (Inoue et al., 1987, Nucl. Acids Res. 15:6131-6148), or a chimeric RNA-DNA analogue (Inoue et al., 1987, FEBS Lett. 215:327-330).

[0787] Polynucleotides of the invention may be synthesized by standard methods known in the art, e.g. by use of an automated DNA synthesizer (such as are commercially available from Biosearch, Applied Biosystems, etc.). As examples, phosphorothioate oligonucleotides may be synthesized by the method of Stein et al. (1988, Nucl. Acids Res. 16:3209), methylphosphonate oligonucleotides can be prepared by use of controlled pore glass polymer supports (Sarin et al., 1988, Proc. Natl. Acad. Sci. U.S.A. 85:7448-7451), etc.

[0788] While antisense nucleotides complementary to the coding region sequence could be used, those complementary to the transcribed untranslated region are most preferred.

[0789] Potential antagonists according to the invention also include catalytic RNA, or a ribozyme (See, e.g., PCT International Publication WO 90/11364, published October 4, 1990; Sarver et al, Science 247:1222-1225 (1990). While ribozymes that cleave mRNA at site specific recognition sequences can be used to destroy mRNAs, the use of hammerhead ribozymes is preferred. Hammerhead ribozymes cleave mRNAs at locations dictated by flanking regions that form complementary base pairs with the target mRNA. The sole requirement is that the target mRNA have the following sequence of two bases: 5′-UG-3′. The construction and production of hammerhead ribozymes is well known in the art and is described more fully in Haseloff and Gerlach, Nature 334:585-591 (1988). There are numerous potential hammerhead ribozyme cleavage sites within the nucleotide sequence of SEQ ID NO:X. Preferably, the ribozyme is engineered so that the cleavage recognition site is located near the 5′ end of the mRNA; i.e., to increase efficiency and minimize the intracellular accumulation of non-functional mRNA transcripts.

[0790] As in the antisense approach, the ribozymes of the invention can be composed of modified oligonucleotides (e.g., for improved stability, targeting, etc.) and should be delivered to cells which express in vivo. DNA constructs encoding the ribozyme may be introduced into the cell in the same manner as described above for the introduction of antisense encoding DNA. A preferred method of delivery involves using a DNA construct “encoding” the ribozyme under the control of a strong constitutive promoter, such as, for example, pol III or pol II promoter, so that transfected cells will produce sufficient quantities of the ribozyme to destroy endogenous messages and inhibit translation. Since ribozymes unlike antisense molecules, are catalytic, a lower intracellular concentration is required for efficiency.

[0791] Antagonist/agonist compounds may be employed to inhibit the cell growth and proliferation effects of the polypeptides of the present invention on neoplastic cells and tissues, i.e. stimulation of angiogenesis of tumors, and, therefore, retard or prevent abnormal cellular growth and proliferation, for example, in tumor formation or growth.

[0792] The antagonist/agonist may also be employed to prevent hyper-vascular diseases, and prevent the proliferation of epithelial lens cells after extracapsular cataract surgery. Prevention of the mitogenic activity of the polypeptides of the present invention may also be desirous in cases such as restenosis after balloon angioplasty.

[0793] The antagonist/agonist may also be employed to prevent the growth of scar tissue during wound healing.

[0794] The antagonist/agonist may also be employed to treat the diseases described herein.

[0795] Thus, the invention provides a method of treating disorders or diseases, including but not limited to the disorders or diseases listed throughout this application, associated with overexpression of a polynucleotide of the present invention by administering to a patient (a) an antisense molecule directed to the polynucleotide of the present invention, and/or (b) a ribozyme directed to the polynucleotide of the present invention.

[0796] Binding Peptides and Other Molecules

[0797] The invention also encompasses screening methods for identifying polypeptides and nonpolypeptides that bind polypeptides of the invention, and the binding molecules identified thereby. These binding molecules are useful, for example, as agonists and antagonists of the polypeptides of the invention. Such agonists and antagonists can be used, in accordance with the invention, in the therapeutic embodiments described in detail, below.

[0798] This method comprises the steps of:

[0799] a. contacting polypeptides of the invention with a plurality of molecules; and

[0800] b. identifying a molecule that binds the polypeptides of the invention.

[0801] The step of contacting the polypeptides of the invention with the plurality of molecules may be effected in a number of ways. For example, one may contemplate immobilizing the polypeptides on a solid support and bringing a solution of the plurality of molecules in contact with the immobilized polypeptides. Such a procedure would be akin to an affinity chromatographic process, with the affinity matrix being comprised of the immobilized polypeptides of the invention. The molecules having a selective affinity for the polypeptides can then be purified by affinity selection. The nature of the solid support, process for attachment of the polypeptides to the solid support, solvent, and conditions of the affinity isolation or selection are largely conventional and well known to those of ordinary skill in the art.

[0802] Alternatively, one may also separate a plurality of polypeptides into substantially separate fractions comprising a subset of or individual polypeptides. For instance, one can separate the plurality of polypeptides by gel electrophoresis, column chromatography, or like method known to those of ordinary skill for the separation of polypeptides. The individual polypeptides can also be produced by a transformed host cell in such a way as to be expressed on or about its outer surface (e.g., a recombinant phage). Individual isolates can then be “probed” by the polypeptides of the invention, optionally in the presence of an inducer should one be required for expression, to determine if any selective affinity interaction takes place between the polypeptides and the individual clone. Prior to contacting the polypeptides with each fraction comprising individual polypeptides, the polypeptides could first be transferred to a solid support for additional convenience. Such a solid support may simply be a piece of filter membrane, such as one made of nitrocellulose or nylon. In this manner, positive clones could be identified from a collection of transformed host cells of an expression library, which harbor a DNA construct encoding a polypeptide having a selective affinity for polypeptides of the invention. Furthermore, the amino acid sequence of the polypeptide having a selective affinity for the polypeptides of the invention can be determined directly by conventional means or the coding sequence of the DNA encoding the polypeptide can frequently be determined more conveniently. The primary sequence can then be deduced from the corresponding DNA sequence. If the amino acid sequence is to be determined from the polypeptide itself, one may use microsequencing techniques. The sequencing technique may include mass spectroscopy.

[0803] In certain situations, it may be desirable to wash away any unbound polypeptides from a mixture of the polypeptides of the invention and the plurality of polypeptides prior to attempting to determine or to detect the presence of a selective affinity interaction. Such a wash step may be particularly desirable when the polypeptides of the invention or the plurality of polypeptides are bound to a solid support.

[0804] The plurality of molecules provided according to this method may be provided by way of diversity libraries, such as random or combinatorial peptide or nonpeptide libraries which can be screened for molecules that specifically bind polypeptides of the invention. Many libraries are known in the art that can be used, e.g., chemically synthesized libraries, recombinant (e.g., phage display libraries), and in vitro translation-based libraries. Examples of chemically synthesized libraries are described in Fodor et al., 1991, Science 251:767-773; Houghten et al., 1991, Nature 354:84-86; Lam et al., 1991, Nature 354:82-84; Medynski, 1994, Bio/Technology 12:709-710;Gallop et al., 1994, J. Medicinal Chemistry 37(9):1233-1251; Ohlmeyer et al., 1993, Proc. Natl. Acad. Sci. USA 90:10922-10926; Erb et al., 1994, Proc. Natl. Acad. Sci. USA 91:11422-11426; Houghten et al., 1992, Biotechniques 13:412; Jayawickreme et al., 1994, Proc. Natl. Acad. Sci. USA 91:1614-1618; Salmon et al., 1993, Proc. Natl. Acad. Sci. USA 90:11708-11712; PCT Publication No. WO 93/20242; and Brenner and Lemer, 1992, Proc. Natl. Acad. Sci. USA 89:5381-5383.

[0805] Examples of phage display libraries are described in Scott and Smith, 1990, Science 249:386-390; Devlin et al., 1990, Science, 249:404-406; Christian, R. B., et al., 1992, J. Mol. Biol. 227:711-718); Lenstra, 1992, J. Immunol. Meth. 152:149-157; Kay et al., 1993, Gene 128:59-65; and PCT Publication No. WO 94/18318 dated Aug. 18, 1994.

[0806] In vitro translation-based libraries include but are not limited to those described in PCT Publication No. WO 91/05058 dated Apr. 18, 1991; and Mattheakis et al., 1994, Proc. Natl. Acad. Sci. USA 91:9022-9026.

[0807] By way of examples of nonpeptide libraries, a benzodiazepine library (see e.g., Bunin et al., 1994, Proc. Natl. Acad. Sci. USA 91:4708-4712) can be adapted for use. Peptoid libraries (Simon et al., 1992, Proc. Natl. Acad. Sci. USA 89:9367-9371) can also be used. Another example of a library that can be used, in which the amide functionalities in peptides have been permethylated to generate a chemically transformed combinatorial library, is describedbyOstreshet al. (1994, Proc. Natl. Acad. Sci. USA 91:11138-11142).

[0808] The variety of non-peptide libraries that are useful in the present invention is great. For example, Ecker and Crooke, 1995, Bio/Technology 13:351-360 list benzodiazepines, hydantoins, piperazinediones, biphenyls, sugar analogs, beta-mercaptoketones, arylacetic acids, acylpiperidines, benzopyrans, cubanes, xanthines, aminimides, and oxazolones as among the chemical species that form the basis of various libraries.

[0809] Non-peptide libraries can be classified broadly into two types: decorated monomers and oligomers. Decorated monomer libraries employ a relatively simple scaffold structure upon which a variety functional groups is added. Often the scaffold will be a molecule with a known useful pharmacological activity. For example, the scaffold might be the benzodiazepine structure.

[0810] Non-peptide oligomer libraries utilize a large number of monomers that are assembled together in ways that create new shapes that depend on the order of the monomers. Among the monomer units that have been used are carbamates, pyrrolinones, and morpholinos. Peptoids, peptide-like oligomers in which the side chain is attached to the alpha amino group rather than the alpha carbon, form the basis of another version of non-peptide oligomer libraries. The first non-peptide oligomer libraries utilized a single type of monomer and thus contained a repeating backbone. Recent libraries have utilized more than one monomer, giving the libraries added flexibility.

[0811] Screening the libraries can be accomplished by any of a variety of commonly known methods. See, e.g., the following references, which disclose screening of peptide libraries: Parmley and Smith, 1989, Adv. Exp. Med. Biol. 251:215-218; Scott and Smith, 1990, Science 249:386-390; Fowlkes et al., 1992; BioTechniques 13:422-427; Oldenburg et al., 1992, Proc. Natl. Acad. Sci. USA 89:5393-5397; Yu et al., 1994, Cell 76:933-945; Staudt et al., 1988, Science 241:577-580; Bock et al., 1992, Nature 355:564-566; Tuerk et al., 1992, Proc. Natl. Acad. Sci. USA 89:6988-6992; Ellington et al., 1992, Nature 355:850-852; U.S. Pat. No. 5,096,815, U.S. Pat. No. 5,223,409, and U.S. Pat. No. 5,198,346, all to Ladner et al.; Rebar and Pabo, 1993, Science 263:671-673; and CT Publication No. WO 94/18318.

[0812] In a specific embodiment, screening to identify a molecule that binds polypeptides of the invention can be carried out by contacting the library members with polypeptides of the invention immobilized on a solid phase and harvesting those library members that bind to the polypeptides of the invention. Examples of such screening methods, termed “panning” techniques are described by way of example in Parmley and Smith, 1988, Gene 73:305-318; Fowlkes et al., 1992, BioTechniques 13:422-427; PCT Publication No. WO 94/18318; and in references cited herein.

[0813] In another embodiment, the two-hybrid system for selecting interacting proteins in yeast (Fields and Song, 1989, Nature 340:245-246; Chien et al., 1991, Proc. Natl. Acad. Sci. USA 88:9578-9582) can be used to identify molecules that specifically bind to polypeptides of the invention.

[0814] Where the binding molecule is a polypeptide, the polypeptide can be conveniently selected from any peptide library, including random peptide libraries, combinatorial peptide libraries, or biased peptide libraries. The term “biased” is used herein to mean that the method of generating the library is manipulated so as to restrict one or more parameters that govern the diversity of the resulting collection of molecules, in this case peptides.

[0815] Thus, a truly random peptide library would generate a collection of peptides in which the probability of finding a particular amino acid at a given position of the peptide is the same for all 20 amino acids. A bias can be introduced into the library, however, by specifying, for example, that a lysine occur every fifth amino acid or that positions 4, 8, and 9 of a decapeptide library be fixed to include only arginine. Clearly, many types of biases can be contemplated, and the present invention is not restricted to any particular bias. Furthermore, the present invention contemplates specific types of peptide libraries, such as phage displayed peptide libraries and those that utilize a DNA construct comprising a lambda phage vector with a DNA insert.

[0816] As mentioned above, in the case of a binding molecule that is a polypeptide, the polypeptide may have about 6 to less than about 60 amino acid residues, preferably about 6 to about 10 amino acid residues, and most preferably, about 6 to about 22 amino acids. In another embodiment, a binding polypeptide has in the range of 15-100 amino acids, or 20-50 amino acids.

[0817] The selected binding polypeptide can be obtained by chemical synthesis or recombinant expression.

[0818] Other Activities

[0819] A polypeptide, polynucleotide, agonist, or antagonist of the present invention, as a result of the ability to stimulate vascular endothelial cell growth, may be employed in treatment for stimulating re-vascularization of ischemic tissues due to various disease conditions such as thrombosis, arteriosclerosis, and other cardiovascular conditions. The polypeptide, polynucleotide, agonist, or antagonist of the present invention may also be employed to stimulate angiogenesis and limb regeneration, as discussed above.

[0820] A polypeptide, polynucleotide, agonist, or antagonist of the present invention may also be employed for treating wounds due to injuries, bums, post-operative tissue repair, and ulcers since they are mitogenic to various cells of different origins, such as fibroblast cells and skeletal muscle cells, and therefore, facilitate the repair or replacement of damaged or diseased tissue.

[0821] A polypeptide, polynucleotide, agonist, or antagonist of the present invention may also be employed stimulate neuronal growth and to treat and prevent neuronal damage which occurs in certain neuronal disorders or neuro-degenerative conditions such as Alzheimer's disease, Parkinson's disease, and AIDS-related complex. A polypeptide, polynucleotide, agonist, or antagonist of the present invention may have the ability to stimulate chondrocyte growth, therefore, they may be employed to enhance bone and periodontal regeneration and aid in tissue transplants or bone grafts.

[0822] A polypeptide, polynucleotide, agonist, or antagonist of the present invention may be also be employed to prevent skin aging due to sunburn by stimulating keratinocyte growth.

[0823] A polypeptide, polynucleotide, agonist, or antagonist of the present invention may also be employed for preventing hair loss, since FGF family members activate hair-forming cells and promotes melanocyte growth. Along the same lines, a polypeptide, polynucleotide, agonist, or antagonist of the present invention may be employed to stimulate growth and differentiation of hematopoietic cells and bone marrow cells when used in combination with other cytokines.

[0824] A polypeptide, polynucleotide, agonist, or antagonist of the present invention may also be employed to maintain organs before transplantation or for supporting cell culture of primary tissues. A polypeptide, polynucleotide, agonist, or antagonist of the present invention may also be employed for inducing tissue of mesodermal origin to differentiate in early embryos.

[0825] A polypeptide, polynucleotide, agonist, or antagonist of the present invention may also increase or decrease the differentiation or proliferation of embryonic stem cells, besides, as discussed above, hematopoietic lineage.

[0826] A polypeptide, polynucleotide, agonist, or antagonist of the present invention may also be used to modulate mammalian characteristics, such as body height, weight, hair color, eye color, skin, percentage of adipose tissue, pigmentation, size, and shape (e.g., cosmetic surgery). Similarly, a polypeptide, polynucleotide, agonist, or antagonist of the present invention may be used to modulate mammalian metabolism affecting catabolism, anabolism, processing, utilization, and storage of energy.

[0827] A polypeptide, polynucleotide, agonist, or antagonist of the present invention may be used to change a mammal's mental state or physical state by influencing biorhythms, caricadic rhythms, depression (including depressive disorders), tendency for violence, tolerance for pain, reproductive capabilities (preferably by Activin or Inhibin-like activity), hormonal or endocrine levels, appetite, libido, memory, stress, or other cognitive qualities.

[0828] A polypeptide, polynucleotide, agonist, or antagonist of the present invention may also be used as a food additive or preservative, such as to increase or decrease storage capabilities, fat content, lipid, protein, carbohydrate, vitamins, minerals, cofactors or other nutritional components.

[0829] The above-recited applications have uses in a wide variety of hosts. Such hosts include, but are not limited to, human, murine, rabbit, goat, guinea pig, camel, horse, mouse, rat, hamster, pig, micro-pig, chicken, goat, cow, sheep, dog, cat, non-human primate, and human. In specific embodiments, the host is a mouse, rabbit, goat, guinea pig, chicken, rat, hamster, pig, sheep, dog or cat. In preferred embodiments, the host is a mammal. In most preferred embodiments, the host is a human.

[0830] Other Preferred Embodiments

[0831] Other preferred embodiments of the claimed invention include an isolated nucleic acid molecule comprising a nucleotide sequence which is at least 95% identical to a sequence of at least about 50 contiguous nucleotides in the nucleotide sequence of SEQ ID NO:X or the complementary strand thereto, the nucleotide sequence as defined in column 5 of Table 1A or columns 8 and 9 of Table 2 or the complementary strand thereto, and/or cDNA contained in Clone ID NO:Z.

[0832] Also preferred is a nucleic acid molecule wherein said sequence of contiguous nucleotides is included in the nucleotide sequence of the portion of SEQ ID NO:X as defined in column 5, “ORF (From-To)”, in Table 1A.

[0833] Also preferred is a nucleic acid molecule wherein said sequence of contiguous nucleotides is included in the nucleotide sequence of the portion of SEQ ID NO:X as defined in columns 8 and 9, “NT From” and “NT To” respectively, in Table 2.

[0834] Also preferred is an isolated nucleic acid molecule comprising a nucleotide sequence which is at least 95% identical to a sequence of at least about 150 contiguous nucleotides in the nucleotide sequence of SEQ ID NO:X or the complementary strand thereto, the nucleotide sequence as defined in column 5 of Table 1A or columns 8 and 9 of Table 2 or the complementary strand thereto, and/or cDNA contained in Clone ID NO:Z.

[0835] Further preferred is an isolated nucleic acid molecule comprising a nucleotide sequence which is at least 95% identical to a sequence of at least about 500 contiguous nucleotides in the nucleotide sequence of SEQ ID NO:X or the complementary strand thereto, the nucleotide sequence as defined in column 5 of Table 1A or columns 8 and 9 of Table 2 or the complementary strand thereto, and/or cDNA contained in Clone ID NO:Z.

[0836] A further preferred embodiment is a nucleic acid molecule comprising a nucleotide sequence which is at least 95% identical to the nucleotide sequence of the portion of SEQ ID NO:X defined in column 5, “ORF (From-To)”, in Table 1A.

[0837] A further preferred embodiment is a nucleic acid molecule comprising a nucleotide sequence which is at least 95% identical to the nucleotide sequence of the portion of SEQ ID NO:X defined in columns 8 and 9, “NT From” and “NT To”, respectively, in Table 2.

[0838] A further preferred embodiment is an isolated nucleic acid molecule comprising a nucleotide sequence which is at least 95% identical to the complete nucleotide sequence of SEQ ID NO:X or the complementary strand thereto, the nucleotide sequence as defined in column 5 of Table 1A or columns 8 and 9 of Table 2 or the complementary strand thereto, and/or cDNA contained in Clone ID NO:Z.

[0839] Also preferred is an isolated nucleic acid molecule which hybridizes under stringent hybridization conditions to a nucleic acid molecule comprising a nucleotide sequence of SEQ ID NO:X or the complementary strand thereto, the nucleotide sequence as defined in column 5 of Table 1A or columns 8 and 9 of Table 2 or the complementary strand thereto, and/or cDNA contained in Clone ID NO:Z, wherein said nucleic acid molecule which hybridizes does not hybridize under stringent hybridization conditions to a nucleic acid molecule having a nucleotide sequence consisting of only A residues or of only T residues. 17881 Also preferred is a composition of matter comprising a DNA molecule which comprises the cDNA contained in Clone ID NO:Z.

[0840] Also preferred is an isolated nucleic acid molecule comprising a nucleotide sequence which is at least 95% identical to a sequence of at least 50 contiguous nucleotides of the cDNA sequence contained in Clone ID NO:Z.

[0841] Also preferred is an isolated nucleic acid molecule, wherein said sequence of at least 50 contiguous nucleotides is included in the nucleotide sequence of an open reading frame sequence encoded by cDNA contained in Clone ID NO:Z.

[0842] Also preferred is an isolated nucleic acid molecule comprising a nucleotide sequence which is at least 95% identical to sequence of at least 150 contiguous nucleotides in the nucleotide sequence encoded by cDNA contained in Clone ID NO:Z.

[0843] A further preferred embodiment is an isolated nucleic acid molecule comprising a nucleotide sequence which is at least 95% identical to sequence of at least 500 contiguous nucleotides in the nucleotide sequence encoded by cDNA contained in Clone ID NO:Z.

[0844] A further preferred embodiment is an isolated nucleic acid molecule comprising a nucleotide sequence which is at least 95% identical to the complete nucleotide sequence encoded by cDNA contained in Clone ID NO:Z.

[0845] A further preferred embodiment is a method for detecting in a biological sample a nucleic acid molecule comprising a nucleotide sequence which is at least 95% identical to a sequence of at least 50 contiguous nucleotides in a sequence selected from the group consisting of: a nucleotide sequence of SEQ ID NO:X or the complementary strand thereto; the nucleotide sequence as defined in column 5 of Table 1A or columns 8 and 9 of Table 2 or the complementary strand thereto; and a nucleotide sequence encoded by cDNA contained in Clone ID NO:Z; which method comprises a step of comparing a nucleotide sequence of at least one nucleic acid molecule in said sample with a sequence selected from said group and determining whether the sequence of said nucleic acid molecule in said sample is at least 95% identical to said selected sequence.

[0846] Also preferred is the above method wherein said step of comparing sequences comprises determining the extent of nucleic acid hybridization between nucleic acid molecules in said sample and a nucleic acid molecule comprising said sequence selected from said group. Similarly, also preferred is the above method wherein said step of comparing sequences is performed by comparing the nucleotide sequence determined from a nucleic acid molecule in said sample with said sequence selected from said group. The nucleic acid molecules can comprise DNA molecules or RNA molecules.

[0847] A further preferred embodiment is a method for identifying the species, tissue or cell type of a biological sample which method comprises a step of detecting nucleic acid molecules in said sample, if any, comprising a nucleotide sequence that is at least 95% identical to a sequence of at least 50 contiguous nucleotides in a sequence selected from the group consisting of: a nucleotide sequence of SEQ ID NO:X or the complementary strand thereto; the nucleotide sequence as defined in column 5 of Table 1A or columns 8 and 9 of Table 2 or the complementary strand thereto; and a nucleotide sequence of the cDNA contained in Clone ID NO:Z.

[0848] The method for identifying the species, tissue or cell type of a biological sample can comprise a step of detecting nucleic acid molecules comprising a nucleotide sequence in a panel of at least two nucleotide sequences, wherein at least one sequence in said panel is at least 95% identical to a sequence of at least 50 contiguous nucleotides in a sequence selected from said group.

[0849] Also preferred is a method for diagnosing in a subject a pathological condition associated with abnormal structure or expression of a nucleotide sequence of SEQ ID NO:X or the complementary strand thereto; the nucleotide sequence as defined in column 5 of Table 1A or columns 8 and 9 of Table 2 or the complementary strand thereto; or the cDNA contained in Clone ID NO:Z which encodes a protein, wherein the method comprises a step of detecting in a biological sample obtained from said subject nucleic acid molecules, if any, comprising a nucleotide sequence that is at least 95% identical to a sequence of at least 50 contiguous nucleotides in a sequence selected from the group consisting of: a nucleotide sequence of SEQ ID NO:X or the complementary strand thereto; the nucleotide sequence as defined in column 5 of Table 1A or columns 8 and 9 of Table 2 or the complementary strand thereto; and a nucleotide sequence of cDNA contained in Clone ID NO:Z.

[0850] The method for diagnosing a pathological condition can comprise a step of detecting nucleic acid molecules comprising a nucleotide sequence in a panel of at least two nucleotide sequences, wherein at least one sequence in said panel is at least 95% identical to a sequence of at least 50 contiguous nucleotides in a sequence selected from said group.

[0851] Also preferred is a composition of matter comprising isolated nucleic acid molecules wherein the nucleotide sequences of said nucleic acid molecules comprise a panel of at least two nucleotide sequences, wherein at least one sequence in said panel is at least 95% identical to a sequence of at least 50 contiguous nucleotides in a sequence selected from the group consisting of: a nucleotide sequence of SEQ ID NO:X or the complementary strand thereto; the nucleotide sequence as defined in column 5 of Table 1A or columns 8 and 9 of Table 2 or the complementary strand thereto; and a nucleotide sequence encoded by cDNA contained in Clone ID NO:Z. The nucleic acid molecules can comprise DNA molecules or RNA molecules.

[0852] Also preferred is a composition of matter comprising isolated nucleic acid molecules wherein the nucleotide sequences of said nucleic acid molecules comprise a DNA microarray or “chip” of at least 1, 2, 3, 4, 5, 6, 7, 8, 9, 10, 15, 20, 25, 30, 40, 50, 100, 150, 200, 250, 300, 500, 1000, 2000, 3000, or 4000 nucleotide sequences, wherein at least one sequence in said DNA microarray or “chip” is at least 95% identical to a sequence of at least 50 contiguous nucleotides in a sequence selected from the group consisting of: a nucleotide sequence of SEQ ID NO:X wherein X is any integer as defined in Table 1A; and a nucleotide sequence encoded by a human cDNA clone identified by a cDNA “Clone ID” in Table 1A.

[0853] Also preferred is an isolated polypeptide comprising an amino acid sequence at least 90% identical to a sequence of at least about 10 contiguous amino acids in the polypeptide sequence of SEQ ID NO:Y; a polypeptide encoded by SEQ ID NO:X or the complementary strand thereto; the polypeptide encoded by the nucleotide sequence as defined in columns 8 and 9 of Table 2; and/or a polypeptide encoded by cDNA contained in Clone ID NO:Z.

[0854] Also preferred is an isolated polypeptide comprising an amino acid sequence at least 95% identical to a sequence of at least about 30 contiguous amino acids in the amino acid sequence of SEQ ID NO:Y; a polypeptide encoded by SEQ ID NO:X or the complementary strand thereto; the polypeptide encoded by the nucleotide sequence as defined in columns 8 and 9 of Table 2; and/or a polypeptide encoded by cDNA contained in Clone ID NO:Z.

[0855] Further preferred is an isolated polypeptide comprising an amino acid sequence at least 95% identical to a sequence of at least about 100 contiguous amino acids in the amino acid sequence of SEQ ID NO:Y; a polypeptide encoded by SEQ ID NO:X or the complementary strand thereto; the polypeptide encoded by the nucleotide sequence as defined in columns 8 and 9 of Table 2; and/or a polypeptide encoded by cDNA contained in Clone ID NO:Z.

[0856] Further preferred is an isolated polypeptide comprising an amino acid sequence at least 95% identical to the complete amino acid sequence of SEQ ID NO:Y; a polypeptide encoded by SEQ ID NO:X or the complementary strand thereto; the polypeptide encoded by the nucleotide sequence as defined in columns 8 and 9 of Table 2; and/or a polypeptide encoded by cDNA contained in Clone ID NO:Z.

[0857] Further preferred is an isolated polypeptide comprising an amino acid sequence at least 90% identical to a sequence of at least about 10 contiguous amino acids in the complete amino acid sequence of a polypeptide encoded by contained in Clone ID NO:Z

[0858] Also preferred is a polypeptide wherein said sequence of contiguous amino acids is included in the amino acid sequence of a portion of said polypeptide encoded by cDNA contained in Clone ID NO:Z; a polypeptide encoded by SEQ ID NO:X or the complementary strand thereto; the polypeptide encoded by the nucleotide sequence as defined in columns 8 and 9 of Table 2; and/or the polypeptide sequence of SEQ ID NO:Y.

[0859] Also preferred is an isolated polypeptide comprising an amino acid sequence at least 95% identical to a sequence of at least about 30 contiguous amino acids in the amino acid sequence of a polypeptide encoded by the cDNA contained in Clone ID NO:Z.

[0860] Also preferred is an isolated polypeptide comprising an amino acid sequence at least 95% identical to a sequence of at least about 100 contiguous amino acids in the amino acid sequence of a polypeptide encoded by cDNA contained in Clone ID NO:Z.

[0861] Also preferred is an isolated polypeptide comprising an amino acid sequence at least 95% identical to the amino acid sequence of a polypeptide encoded by the cDNA contained in Clone ID NO:Z.

[0862] Further preferred is an isolated antibody which binds specifically to a polypeptide comprising an amino acid sequence that is at least 90% identical to a sequence of at least 10 contiguous amino acids in a sequence selected from the group consisting of: a polypeptide sequence of SEQ ID NO:Y; a polypeptide encoded by SEQ ID NO:X or the complementary strand thereto; the polypeptide encoded by the nucleotide sequence as defined in columns 8 and 9 of Table 2; and a polypeptide encoded by the cDNA contained in Clone ID NO:Z.

[0863] Further preferred is a method for detecting in a biological sample a polypeptide comprising an amino acid sequence which is at least 90% identical to a sequence of at least 10 contiguous amino acids in a sequence selected from the group consisting of: a polypeptide sequence of SEQ ID NO:Y; a polypeptide encoded by SEQ ID NO:X or the complementary strand thereto; the polypeptide encoded by the nucleotide sequence as defined in columns 8 and 9 of Table 2; and a polypeptide encoded by the cDNA contained in Clone ID NO:Z; which method comprises a step of comparing an amino acid sequence of at least one polypeptide molecule in said sample with a sequence selected from said group and determining whether the sequence of said polypeptide molecule in said sample is at least 90% identical to said sequence of at least 10 contiguous amino acids.

[0864] Also preferred is the above method wherein said step of comparing an amino acid sequence of at least one polypeptide molecule in said sample with a sequence selected from said group comprises determining the extent of specific binding of polypeptides in said sample to an antibody which binds specifically to a polypeptide comprising an amino acid sequence that is at least 90% identical to a sequence of at least 10 contiguous amino acids in a sequence selected from the group consisting of: a polypeptide sequence of SEQ ID NO:Y; a polypeptide encoded by SEQ ID NO:X or the complementary strand thereto; the polypeptide encoded by the nucleotide sequence as defined in columns 8 and 9 of Table 2; and a polypeptide encoded by the cDNA contained in Clone ID NO:Z.

[0865] Also preferred is the above method wherein said step of comparing sequences is performed by comparing the amino acid sequence determined from a polypeptide molecule in said sample with said sequence selected from said group.

[0866] Also preferred is a method for identifying the species, tissue or cell type of a biological sample which method comprises a step of detecting polypeptide molecules in said sample, if any, comprising an amino acid sequence that is at least 90% identical to a sequence of at least 10 contiguous amino acids in a sequence selected from the group consisting of: polypeptide sequence of SEQ ID NO:Y; a polypeptide encoded by SEQ ID NO:X or the complementary strand thereto; the polypeptide encoded by the nucleotide sequence as defined in columns 8 and 9 of Table 2; and a polypeptide encoded by the cDNA contained in Clone ID NO:Z.

[0867] Also preferred is the above method for identifying the species, tissue or cell type of a biological sample, which method comprises a step of detecting polypeptide molecules comprising an amino acid sequence in a panel of at least two amino acid sequences, wherein at least one sequence in said panel is at least 90% identical to a sequence of at least 10 contiguous amino acids in a sequence selected from the above group.

[0868] Also preferred is a method for diagnosing in a subject a pathological condition associated with abnormal structure or expression of a nucleic acid sequence identified in Table 1A or Table 2 encoding a polypeptide, which method comprises a step of detecting in a biological sample obtained from said subject polypeptide molecules comprising an amino acid sequence in a panel of at least two amino acid sequences, wherein at least one sequence in said panel is at least 90% identical to a sequence of at least 10 contiguous amino acids in a sequence selected from the group consisting of: polypeptide sequence of SEQ ID NO:Y; a polypeptide encoded by SEQ ID NO:X or the complementary strand thereto; the polypeptide encoded by the nucleotide sequence as defined in columns 8 and 9 of Table 2; and a polypeptide encoded by the cDNA contained in Clone ID NO:Z.

[0869] In any of these methods, the step of detecting said polypeptide molecules includes using an antibody.

[0870] Also preferred is an isolated nucleic acid molecule comprising a nucleotide sequence which is at least 95% identical to a nucleotide sequence encoding a polypeptide wherein said polypeptide comprises an amino acid sequence that is at least 90% identical to a sequence of at least 10 contiguous amino acids in a sequence selected from the group consisting of: polypeptide sequence of SEQ ID NO:Y; a polypeptide encoded by SEQ ID NO:X or the complementary strand thereto; the polypeptide encoded by the nucleotide sequence as defined in columns 8 and 9 of Table 2; and a polypeptide encoded by the cDNA contained in Clone ID NO:Z.

[0871] Also preferred is an isolated nucleic acid molecule, wherein said nucleotide sequence encoding a polypeptide has been optimized for expression of said polypeptide in a prokaryotic host.

[0872] Also preferred is a polypeptide molecule, wherein said polypeptide comprises an amino acid sequence selected from the group consisting of: polypeptide sequence of SEQ ID NO:Y; a polypeptide encoded by SEQ ID NO:X or the complementary strand thereto; the polypeptide encoded by the nucleotide sequence as defined in columns 8 and 9 of Table 2; and a polypeptide encoded by the cDNA contained in Clone ID NO:Z.

[0873] Further preferred is a method of making a recombinant vector comprising inserting any of the above isolated nucleic acid molecule into a vector. Also preferred is the recombinant vector produced by this method. Also preferred is a method of making a recombinant host cell comprising introducing the vector into a host cell, as well as the recombinant host cell produced by this method.

[0874] Also preferred is a method of making an isolated polypeptide comprising culturing this recombinant host cell under conditions such that said polypeptide is expressed and recovering said polypeptide. Also preferred is this method of making an isolated polypeptide, wherein said recombinant host cell is a eukaryotic cell and said polypeptide is a human protein comprising an amino acid sequence selected from the group consisting of: polypeptide sequence of SEQ ID NO:Y; a polypeptide encoded by SEQ ID NO:X or the complementary strand thereto; the polypeptide encoded by the nucleotide sequence as defined in columns 8 and 9 of Table 2; and a polypeptide encoded by the cDNA contained in Clone ID NO:Z. The isolated polypeptide produced by this method is also preferred.

[0875] Also preferred is a method of treatment of an individual in need of an increased level of a protein activity, which method comprises administering to such an individual a Therapeutic comprising an amount of an isolated polypeptide, polynucleotide, immunogenic fragment or analogue thereof, binding agent, antibody, or antigen binding fragment of the claimed invention effective to increase the level of said protein activity in said individual.

[0876] Also preferred is a method of treatment of an individual in need of a decreased level of a protein activity, which method comprised administering to such an individual a Therapeutic comprising an amount of an isolated polypeptide, polynucleotide, immunogenic fragment or analogue thereof, binding agent, antibody, or antigen binding fragment of the claimed invention effective to decrease the level of said protein activity in said individual.

[0877] Also preferred is a method of treatment of an individual in need of a specific delivery of toxic compositions to diseased cells (e.g., tumors, leukemias or lymphomas), which method comprises administering to such an individual a Therapeutic comprising an amount of an isolated polypeptide of the invention, including, but not limited to a binding agent, or antibody of the claimed invention that are associated with toxin or cytotoxic prodrugs.

[0878] Having generally described the invention, the same will be more readily understood by reference to the following examples, which are provided by way of illustration and are not intended as limiting.

TABLE 6

| ATCC Deposits | Deposit Date | ATCC Designation Number |
|---|---|---|
| LP01, LP02, LP03, | May-2-97 | 209059, 209060, 209061, |
| LP04, LP05, LP06, | | 209062, 209063, 209064, |
| LP07, LP08, LP09, | | 209065, 209066, 209067, |
| LP10, LP11, | | 209068, 209069 |
| LP12 | Jan-12-98 | 209579 |
| LP13 | Jan-12-98 | 209578 |
| LP14 | Jul-16-98 | 203067 |
| LP15 | Jul-16-98 | 203068 |
| LP16 | Feb-1-99 | 203609 |
| LP17 | Feb-1-99 | 203610 |
| LP20 | Nov-17-98 | 203485 |
| LP21 | Jun-18-99 | PTA-252 |
| LP22 | Jun-18-99 | PTA-253 |
| LP23 | Dec-22-99 | PTA-1081 |

### EXAMPLES

### Example 1

### Isolation of a Selected cDNA Clone from the Deposited Sample

[0879] Each Clone ID NO:Z is contained in a plasmid vector. Table 7 identifies the vectors used to construct the cDNA library from which each clone was isolated. In many cases, the vector used to construct the library is a phage vector from which a plasmid has been excised. The following correlates the related plasmid for each phage vector used in constructing the cDNA library. For example, where a particular clone is identified in Table 7 as being isolated in the vector “Lambda Zap,” the corresponding deposited clone is in “pBluescript.”

| Vector Used to Construct Library | Corresponding Deposited Plasmid |
|---|---|
| Lambda Zap | pBluescript(pBS) |
| Uni-Zap XR | pBluescript(pBS) |
| Zap Express | pBK |
| lafmid BA | plafmid BA |
| pSport1 | pSport1 |
| pCMVSport 2.0 | pCMVSport 2.0 |
| pCMVSport 3.0 | pCMVSport 3.0 |
| pCR ® 2.1 | pCR ® 2.1 |

[0880] Vectors Lambda Zap (U.S. Pat. Nos. 5,128,256 and 5,286,636), Uni-Zap XR (U.S. Pat. Nos. 5,128, 256 and 5,286,636), Zap Express (U.S. Pat. Nos. 5,128,256 and 5,286,636), pBluescript (pBS) (Short, J. M. et al., Nucleic Acids Res. 16:7583-7600 (1988); Alting-Mees, M. A. and Short, J. M., Nucleic Acids Res. 17:9494 (1989)) and pBK (Alting-Mees, M. A. et al., Strategies 5:58-61 (1992)) are commercially available from Stratagene Cloning Systems, Inc., 11011 N. Torrey Pines Road, La Jolla, Calif., 92037. pBS contains an ampicillin resistance gene and pBK contains a neomycin resistance gene. Both can be transformed into E. coli strain XL-1 Blue, also available from Stratagene. pBS comes in 4 forms SK+, SK−, KS+ and KS. The S and K refers to the orientation of the polylinker to the T7 and T3 primer sequences which flank the polylinker region (“S” is for SacI and “K” is for KpnI which are the first sites on each respective end of the linker). “+” or “−” refer to the orientation of the f1 origin of replication (“ori”), such that in one orientation, single stranded rescue initiated from the f1 ori generates sense strand DNA and in the other, antisense.

[0881] Vectors pSport1, pCMVSport 2.0 and pCMVSport 3.0, were obtained from Life Technologies, Inc., P. O. Box 6009, Gaithersburg, Md. 20897. All Sport vectors contain an ampicillin resistance gene and may be transformed into E. coli strain DH10B, also available from Life Technologies. (See, for instance, Gruber, C. E., et al., Focus 15:59 (1993)). Vector lafmid BA (Bento Soares, Columbia University, NY) contains an ampicillin resistance gene and can be transformed into E. coli strain XL-1 Blue. Vector pCR® 2.1, which is available from Invitrogen, 1600 Faraday Avenue, Carlsbad, Calif. 92008, contains an ampicillin resistance gene and may be transformed into E. coli strain DH10B, available from Life Technologies. (See, for instance, Clark, J. M., Nuc. Acids Res. 16:9677-9686 (1988) and Mead, D. et al., Bio/Technology 9: (1991)). Preferably, a polynucleotide of the present invention does not comprise the phage vector sequences identified for the particular clone in Table 7, as well as the corresponding plasmid vector sequences designated above.

[0882] The deposited material in the sample assigned the ATCC Deposit Number cited by reference to Tables 1, 2, 6 and 7 for any given cDNA clone also may contain one or more additional plasmids, each comprising a cDNA clone different from that given clone. Thus, deposits sharing the same ATCC Deposit Number contain at least a plasmid for each Clone ID NO:Z.

TABLE 7

| Libraries owned by Catalog | Catalog Description | Vector | ATCC Deposit |
|---|---|---|---|
| HUKA HUKB HUKC HUKD HUKE | Human Uterine Cancer | Lambda ZAP II | LP01 |
| HUKF HUKG | | | |
| HCNA HCNB | Human Colon | Lambda Zap II | LP01 |
| HFFA | Human Fetal Brain, random primed | Lambda Zap II | LP01 |
| HTWA | Resting T-Cell | Lambda Zap II | LP01 |
| HBQA | Early Stage Human Brain, random | Lambda Zap II | LP01 |
| | primed | | |
| HLMB HLMF HLMG HLMH HLMI | breast lymph node CDNA library | Lambda Zap II | LP01 |
| HLMJ HLMM HLMN | | | |
| HCQA HCQB | human colon cancer | Lambda Zap II | LP01 |
| HMEA HMEC HMED HMEE HMEF | Human Microvascular Endothelial Cells, | Lambda Zap II | LP01 |
| HMEG HMEI HMEJ HMEK HMEL | fract. A | | |
| HUSA HUSC | Human Umbilical Vein Endothelial | Lambda Zap II | LP01 |
| | Cells, fract. A | | |
| HLQA HLQB | Hepatocellular Tumor | Lambda Zap II | LP01 |
| HHGA HHGB HHGC HHGD | Hemangiopericytoma | Lambda Zap II | LP01 |
| HSDM | Human Striatum Depression, re-rescue | Lambda Zap II | LP01 |
| HUSH | H Umbilical Vein Endothelial Cells, | Lambda Zap II | LP01 |
| | frac A, re-excision | | |
| HSGS | Salivary gland, subtracted | Lambda Zap II | LP01 |
| HFXA HFXB HFXC HFXD HFXE | Brain frontal cortex | Lambda Zap II | LP01 |
| HFXF HFXG HFXH | | | |
| HPQA HPQB HPQC | PERM TF274 | Lambda Zap II | LP01 |
| HFXJ HFXK | Brain Frontal Cortex, re-excision | Lambda Zap II | LP01 |
| HCWA HCWB HCWC HCWD HCWE | CD34 positive cells (Cord Blood) | ZAP Express | LP02 |
| HCWF HCWG HCWH HCWI HCWJ | | | |
| HCWK | | | |
| HCUA HCUB HCUC | CD34 depleted Buffy Coat (Cord Blood) | ZAP Express | LP02 |
| HRSM | A-14 cell line | ZAP Express | LP02 |
| HRSA | A1-CELL LINE | ZAP Express | LP02 |
| HCUD HCUE HCUF HCUG HCUH | CD34 depleted Buffy Coat (Cord Blood), | ZAP Express | LP02 |
| HCUI | re-excision | | |
| HBXE HBXF HBXG | H. Whole Brain #2, re-excision | ZAP Express | LP02 |
| HRLM | L8 cell line | ZAP Express | LP02 |
| HBXA HBXB HBXC HBXD | Human Whole Brain #2 - Oligo dT> | ZAP Express | LP02 |
| | 1.5 Kb | | |
| HUDA HUDB HUDC | Testes | ZAP Express | LP02 |
| HHTM HHTN HHTO | H. hypothalamus, frac A: re-excision | ZAP Express | LP02 |
| HHTL | H. hypothalmus, frac A | ZAP Express | LP02 |
| HASA HASD | Human Adult Spleen | Uni-ZAP XR | LP03 |
| HFKC HFKD HFKE HFKF HFKG | Human Fetal Kidney | Uni-ZAP XR | LP03 |
| HE8A HE8B HE8C HE8D HE8E | Human 8 Week Whole Embryo | Uni-ZAP XR | LP03 |
| HE8F HE8M HHE8N | | | |
| HGBA HGBD HGBE HGBF HGBG | Human Gall Bladder | Uni-ZAP XR | LP03 |
| HGBH HGBI | | | |
| HLHA HLHB HLHC HLHD HLHE | Human Fetal Lung III | Uni-ZAP XR | LP03 |
| HLHF HLHG HLHH HLHQ | | | |
| HPMA HPMB HPMC HPMD HPME | Human Placenta | Uni-ZAP XR | LP03 |
| HPMF HPMG HPMH | | | |
| HPRA HPRB HPRC HPRD | Human Prostate | Uni-ZAP XR | LP03 |
| HSIA HSIC HSID HHSIE | Human Adult Small Intestine | Uni-ZAP XR | LP03 |
| HTEA HTEB HTEC HTED HTEE | Human Testes | Uni-ZAP XR | LP03 |
| HTEF HTEG HTEH HTEI HTEJ | | | |
| HTEK | | | |
| HTPA HTPB HTPC HTPD HTPE | Human Pancreas Tumor | Uni-ZAP XR | LP03 |
| HTTA HTTB HTTC HTTD HTTE | Human Testes Tumor | Uni-ZAP XR | LP03 |
| HTTF | | | |
| HAPA HAPB HAPC HAPM | Human Adult Pulmonary | Uni-ZAP XR | LP03 |
| HETA HETB HETC HETD HETE | Human Endometrial Tumor | Uni-ZAP XR | LP03 |
| HETF HETG HETH HETI | | | |
| HHFB HHFC HHFD HHFE HHFF | Human Fetal Heart | Uni-ZAP XR | LP03 |
| HHFG HHFH HHFI | | | |
| HHPB HHPC HHPD HHPE HHPF | Human Hippocampus | Uni-ZAP XR | LP03 |
| HHPG HHPH | | | |
| HCE1 HCE2 HCE3 HCE4 HCE5 | Human Cerebellum | Uni-ZAP XR | LP03 |
| HCEB HCEC HCED HCEE HCEF | | | |
| HCEG | | | |
| HUVB HUVC HUVD HUVE | Human Umbilical Vein, Endo. remake | Uni-ZAP XR | LP03 |
| HSTA HSTB HSTC HSTD | Human Skin Tumor | Uni-ZAP XR | LP03 |
| HTAA HTAB HTAC HTAD HTAE | Human Activated T-Cells | Uni-ZAP XR | LP03 |
| HFEA HFEB HFEC | Human Fetal Epithelium (Skin) | Uni-ZAP XR | LP03 |
| HJPA HJPB HJPC HJPD | HUMAN JURKAT MEMBRRANE | Uni-ZAP XR | LP03 |
| | BOUND POLYSOMES | | |
| HESA | Human epithelioid sarcoma | Uni-ZAP XR | LP03 |
| HLTA HLTB HLTC HLTD HLTE | Human T-Cell Lymphoma | Uni-ZAP XR | LP03 |
| HLTF | | | |
| HFTA HFTB HFTC HFTD | Human Fetal Dura Mater | Uni-ZAP XR | LP03 |
| HRDA HRDB HRDC HRDD HRDE | Human Rhabdomyosarcoma | Uni-ZAP XR | LP03 |
| HRDF | | | |
| HCAA HCAB HCAC | Cem cells cyclohexamide treated | Uni-ZAP XR | LP03 |
| HRGA HRGB HRGC HRGD | Raji Cells, cyclohexamide treated | Uni-ZAP XR | LP03 |
| HSUA HSUB HSUC HSUM | Supt Cells, cyclohexamide treated | Uni-ZAP XR | LP03 |
| HT4A HT4C HT4D | Activated T-Cells, 12 hrs. | Uni-ZAP XR | LP03 |
| HE9A HE9B HE9C HE9D HE9E | Nine Week Old Early Stage Human | Uni-ZAP XR | LP03 |
| HE9F HE9G HE9H HE9M HE9N | | | |
| HATA HATB HATC HATD HATE | Human Adrenal Gland Tumor | Uni-ZAP XR | LP03 |
| HT5A | Activated T-Cells, 24 hrs. | Uni-ZAP XR | LP03 |
| HFGA HFGM | Human Fetal Brain | Uni-ZAP XR | LP03 |
| HNEA HNEB HNEC HNED HNEE | Human Neutrophil | Uni-ZAP XR | LP03 |
| HBGB HBGD | Human Primary Breast Cancer | Uni-ZAP XR | LP03 |
| HCAS | Cem Cells, cyclohexamide treated, subtra | Uni-ZAP XR | LP03 |
| HHPS | Human Hippocampus, subtracted | pBS | LP03 |
| HKCS HKCU | Human Colon Cancer, subtracted | pBS | LP03 |
| HRGS | Raji cells, cyclohexamide treated, | pBS | LP03 |
| | subtracted | | |
| HSUT | Supt cells, cyclohexamide treated, | pBS | LP03 |
| | differentially expressed | | |
| HT4S | Activated T-Cells, 12 hrs, subtracted | Uni-ZAP XR | LP03 |
| HCDA HCDB HCDC HCDD HCDE | Human Chondrosarcoma | Uni-ZAP XR | LP03 |
| HOAA HOAB HOAC | Human Osteosarcoma | Uni-ZAP XR | LP03 |
| HTLA HTLB HTLC HTLD HTLE | Human adult testis, large inserts | Uni-ZAP XR | LP03 |
| HTLF | | | |
| HLMA HLMC HLMD | Breast Lymph node cDNA library | Uni-ZAP XR | LP03 |
| H6EA H6EB H6EC | HL-60, PMA 4H | Uni-ZAP XR | LP03 |
| HTXA HTXB HTXC HTXD HTXE | Activated T-Cell (12 hrs)/Thiouridine | Uni-ZAP XR | LP03 |
| HTXF HTXG HTXH | labelledEco | | |
| HNFA HNFB HNFC HNFD HNFE | Human Neutrophil, Activated | Uni-ZAP XR | LP03 |
| HNFF HNFG HNFH HNFJ | | | |
| HTOB HTOC | HUMAN TONSILS, FRACTION 2 | Uni-ZAP XR | LP03 |
| HMGB | Human OB MG63 control fraction I | Uni-ZAP XR | LP03 |
| HOPB | Human OB HOS control fraction I | Uni-ZAP XR | LP03 |
| HORB | Human OB HOS treated (10 nM E2) | Uni-ZAP XR | LP03 |
| | fraction I | | |
| HSVA HSVB HSVC | Human Chronic Synovitis | Uni-ZAP XR | LP03 |
| HROA | HUMAN STOMACH | Uni-ZAP XR | LP03 |
| HBJA HBJB HBJC HBJD HBJE HBJF | HUMAN B CELL LYMPHOMA | Uni-ZAP XR | LP03 |
| HBJG HBJH HBJI HBJJ HBJK | | | |
| HCRA HCRB HCRC | human corpus colosum | Uni-ZAP XR | LP03 |
| HODA HODB HODC HODD | human ovarian cancer | Uni-ZAP XR | LP03 |
| HDSA | Dermatofibrosarcoma Protuberance | Uni-ZAP XR | LP03 |
| HMWA HMWB HMWC HMWD | Bone Marrow Cell Line (RS4;11) | Uni-ZAP XR | LP03 |
| HMWE HMWF HMWG HMWH | | | |
| HMWI HMWJ | | | |
| HSOA | stomach cancer (human) | Uni-ZAP XR | LP03 |
| HERA | SKIN | Uni-ZAP XR | LP03 |
| HMDA | Brain-medulloblastoma | Uni-ZAP XR | LP03 |
| HGLA HGLB HGLD | Ghoblastoma | Uni-ZAP XR | LP03 |
| HEAA | H. Atrophic Endometrium | Uni-ZAP XR | LP03 |
| HBCA HBCB | H. Lymph node breast Cancer | Uni-ZAP XR | LP03 |
| HPWT | Human Prostate BPH, re-excision | Uni-ZAP XR | LP03 |
| HFVG HFVH HFVI | Fetal Liver, subtraction II | pBS | LP03 |
| HNFI | Human Neutrophils, Activated, re- | pBS | LP03 |
| | excision | | |
| HBMB HBMC HBMD | Human Bone Marrow, re-excision | pBS | LP03 |
| HKML HKMM HKMN | H. Kidney Medulla, re-excision | pBS | LP03 |
| HKIX HKIY | H. Kidney Cortex, subtracted | pBS | LP03 |
| HADT | H. Amygdala Depression, subtracted | pBS | LP03 |
| H6AS | Hl-60, untreated, subtracted | Uni-ZAP XR | LP03 |
| H6ES | HL-60, PMA 4H, subtracted | Uni-ZAP XR | LP03 |
| H6BS | HL-60, RA 4h, Subtracted | Uni-ZAP XR | LP03 |
| H6CS | HL-60, PMA 1d, subtracted | Uni-ZAP XR | LP03 |
| HTXJ HTXK | Activated T-cell (12 h)/Thiouridine-re- | Uni-ZAP XR | LP03 |
| | excision | | |
| HMSA HMSB HMSC HMSD HMSE | Monocyte activated | Uni-ZAP XR | LP03 |
| HMSF HMSG HMSH HMSI HMSJ | | | |
| HMSK | | | |
| HAGA HAGB HAGC HAGD HAGE | Human Amygdala | Uni-ZAP XR | LP03 |
| HAGF | | | |
| HSRA HSRB HSRE | STROMAL-OSTEOCLASTOMA | Uni-ZAP XR | LP03 |
| HSRD HSRF HSRG HSRH | Human Osteoclastoma Stromal Cells - | Uni-ZAP XR | LP03 |
| | unamplified | | |
| HSQA HSQB HSQC HSQD HSQE | Stromal cell TF274 | Uni-ZAP XR | LP03 |
| HSQF HSQG | | | |
| HSKA HSKB HSKC HSKD HSKE | Smooth muscle, serum treated | Uni-ZAP XR | LP03 |
| HSKF HSKZ | | | |
| HSLA HSLB HSLC HSLD HSLE | Smooth muscle, control | Uni-ZAP XR | LP03 |
| HSLF HSLG | | | |
| HSDA HSDD HSDE HSDF HSDG | Spinal cord | Uni-ZAP XR | LP03 |
| HSDH | | | |
| HPWS | Prostate-BPH subtracted II | pBS | LP03 |
| HSKW HSKX HSKY | Smooth Muscle - HASTE normalized | pBS | LP03 |
| HFPB HFPC HFPD | H. Frontal cortex, epileptic: re-excision | Uni-ZAP XR | LP03 |
| HSDI HSDJ HSDK | Spinal Cord, re-excision | Uni-ZAP XR | LP03 |
| HSKN HSKO | Smooth Muscle Serum Treated, Norm | pBS | LP03 |
| HSKG HSKH HSKI | Smooth muscle, serum induced, re-exc | pBS | LP03 |
| HFCA HFCB HFCC HFCD HFCE | Human Fetal Brain | Uni-ZAP XR | LP04 |
| HFCF | | | |
| HPTA HPTB HPTD | Human Pituitary | Uni-ZAP XR | LP04 |
| HTHB HTHC HTHD | Human Thymus | Uni-ZAP XR | LP04 |
| HE6B HE6C HE6D HE6E | Human Whole Six Week Old Embryo | Uni-ZAP XR | LP04 |
| HE6F HE6G HE6S | | | |
| HSSA HSSB HSSC HSSD HSSE | Human Synovial Sarcoma | Uni-ZAP XR | LP04 |
| HSSF HSSG HSSH HSSI HSSJ HSSK | | | |
| HE7T | 7 Week Old Early Stage Human, | Uni-ZAP XR | LP04 |
| | subtracted | | |
| HEPA HEPB HEPC | Human Epididymus | Uni-ZAP XR | LP04 |
| HSNA HSNB HSNC HSNM HSNN | Human Synovium | Uni-ZAP XR | LP04 |
| HPFB HPFC HPFD HPFE | Human Prostate Cancer, Stage C fraction | Uni-ZAP XR | LP04 |
| HE2A HE2D HE2E HE2H HE2I | 12 Week Old Early Stage Human | Uni-ZAP XR | LP04 |
| HE2M HE2N HE2O | | | |
| HE2B HE2C HE2F HE2G HE2P | 12 Week Old Early Stage Human, II | Uni-ZAP XR | LP04 |
| HE2Q | | | |
| HPTS HPTT HPTU | Human Pituitary, subtracted | Uni-ZAP XR | LP04 |
| HAUA HAUB HAUC | Amniotic Cells - TNF induced | Uni-ZAP XR | LP04 |
| HAQA HAQB HAQC HAQD | Amniotic Cells, Primary Culture | Uni-ZAP XR | LP04 |
| HWTA HWTB HWTC | wilm's tumor | Uni-ZAP XR | LP04 |
| HBSD | Bone Cancer, re-excision | Uni-ZAP XR | LP04 |
| HSGB | Salivary gland, re-excision | Uni-ZAP XR | LP04 |
| HSJA HSJB HSJC | Smooth muscle-IL1b induced | Uni-ZAP XR | LP04 |
| HSXA HSXB HSXC HSXD | Human Substantia Nigra | Uni-ZAP XR | LP04 |
| HSHA HSHB HSHC | Smooth muscle, IL1b induced | Uni-ZAP XR | LP04 |
| HOUA HOUB HOUC HOUD HOUE | Adipocytes | Uni-ZAP XR | LP04 |
| HPWA HPWB HPWC HPWD HPWE | Prostate BPH | Uni-ZAP XR | LP04 |
| HELA HELB HELC HELD HELE | Endothelial cells-control | Uni-ZAP XR | LP04 |
| HELF HELG HELH | | | |
| HEMA HEMB HEMC HEMD HEME | Endothelial-induced | Uni-ZAP XR | LP04 |
| HEMF HEMG HEMH | | | |
| HBIA HBIB HBIC | Human Brain, Striatum | Uni-ZAP XR | LP04 |
| HHSA HHSB HHSC HHSD HHSE | Human Hypothalmus, Schizophrenia | Uni-ZAP XR | LP04 |
| HNGA HNGB HNGC HNGD HNGE | neutrophils control | Uni-ZAP XR | LP04 |
| HNGF HNGG HNGH HNGI HNGJ | | | |
| HNHA HNHB HNHC HNHD HNHE | Neutrophils IL-1 and LPS induced | Uni-ZAP XR | LP04 |
| HNHF HNHG HNHH HNHI HNHJ | | | |
| HSDB HSDC | STRIATUM DEPRESSION | Uni-ZAP XR | LP04 |
| HHPT | Hypothalamus | Uni-ZAP XR | LP04 |
| HSAT HSAU HSAV HSAW HSAX | Anergic T-cell | Uni-ZAP XR | LP04 |
| HSAY HSAZ | | | |
| HBMS HBMT HBMU HBMV HBMW | Bone marrow | Uni-ZAP XR | LP04 |
| HBMX | | | |
| HOEA HOEB HOEC HOED HOEE | Osteoblasts | Uni-ZAP XR | LP04 |
| HOEF HOEJ | | | |
| HAIA HAIB HAIC HAID HAIE HAIF | Epithelial-TNFa and INF induced | Uni-ZAP XR | LP04 |
| HTGA HTGB HTGC HTGD | Apoptotic T-cell | Uni-ZAP XR | LP04 |
| HMCA HMCB HMCC HMCD HMCE | Macrophage-oxLDL | Uni-ZAP XR | LP04 |
| HMAA HMAB HMAC HMAD HMAE | Macrophage (GM-CSF treated) | Uni-ZAP XR | LP04 |
| HMAF HMAG | | | |
| HPHA | Normal Prostate | Uni-ZAP XR | LP04 |
| HPIA HPIB HPIC | LNCAP prostate cell line | Uni-ZAP XR | LP04 |
| HPJA HPJB HPJC | PC3 Prostate cell line | Uni-ZAP XR | LP04 |
| HOSE HOSF HOSG | Human Osteoclastoma, re-excision | Uni-ZAP XR | LP04 |
| HTGE HTGF | Apoptotic T-cell, re-excision | Uni-ZAP XR | LP04 |
| HMAJ HMAK | H Macrophage (GM-CSF treated), | Uni-ZAP XR | LP04 |
| | re-excision | | |
| HACB HACC HACD | Human Adipose Tissue, re-excision | Uni-ZAP XR | LP04 |
| HFPA | H. Frontal Cortex, Epileptic | Uni-ZAP XR | LP04 |
| HFAA HFAB HFAC HFAD HFAE | Alzheimer's, spongy change | Uni-ZAP XR | LP04 |
| HFAM | Frontal Lobe, Dementia | Uni-ZAP XR | LP04 |
| HMIA HMIB HMIC | Human Manic Depression Tissue | Uni-ZAP XR | LP04 |
| HTSA HTSE HTSF HTSG HTSH | Human Thymus | pBS | LP05 |
| HPBA HPBB HPBC HPBD HPBE | Human Pineal Gland | pBS | LP05 |
| HSAA HSAB HSAC | HSA 172 Cells | pBS | LP05 |
| HSBA HSBB HSBC HSBM | HSC172 cells | pBS | LP05 |
| HJAA HJAB HJAC HJAD | Jurkat T-cell G1 phase | pBS | LP05 |
| HJBA HJBB HJBC HJBD | Jurkat T-Cell, S phase | pBS | LP05 |
| HAFA HAFB | Aorta endothelial cells + TNF-a | pBS | LP05 |
| HAWA HAWB HAWC | Human White Adipose | pBS | LP05 |
| HTNA HTNB | Human Thyroid | pBS | LP05 |
| HONA | Normal Ovary, Premenopausal | pBS | LP05 |
| HARA HARB | Human Adult Retina | pBS | LP05 |
| HLJA HLJB | Human Lung | pCMVSport 1 | LP06 |
| HOFM HOFN HOFO | H. Ovarian Tumor, II, OV5232 | pCMVSport 2.0 | LP07 |
| HOGA HOGB HOGC | OV 10-3-95 | pCMVSport 2.0 | LP07 |
| HCGL | CD34 + cells, II | pCMVSport 2.0 | LP07 |
| HDLA | Hodgin's Lymphoma I | pCMVSport 2.0 | LP07 |
| HDTA HDTB HDTC HDTD HDTE | Hodgkin's Lymphoma II | pCMVSport 2.0 | LP07 |
| HKAA HKAB HKAC HKAD HKAE | Keratinocyte | pCMVSport 2.0 | LP07 |
| HKAF HKAG HKAH | | | |
| HCIM | CAPFINDER, Crohn's Disease, lib 2 | pCMVSport 2.0 | LP07 |
| HKAL | Keratinocyte, lib 2 | pCMVSport 2.0 | LP07 |
| HKAT | Keratinocyte, lib 3 | pCMVSport 2.0 | LP07 |
| HNDA | Nasal polyps | pCMVSport 2.0 | LP07 |
| HDRA | H. Primary Dendritic Cells, lib 3 | pCMVSport 2.0 | LP07 |
| HOHA HOHB HOHC | Human Osteoblasts II | pCMVSport 2.0 | LP07 |
| HLDA HLDB HLDC | Liver, Hepatoma | pCMVSport 3.0 | LP08 |
| HLDN HLDO HLDP | Human Liver, normal | pCMVSport 3.0 | LP08 |
| HMTA | pBMC stimulated w/ poly I/C | pCMVSport 3.0 | LP08 |
| HNTA | NTERA2, control | pCMVSport 3.0 | LP08 |
| HDPA HDPB HDPC HDPD HDPF | Primary Dendritic Cells, lib 1 | pCMVSport 3.0 | LP08 |
| HDPG HDPH HDPI HDPJ HDPK | | | |
| HDPM HDPN HDPO HDPP | Primary Dendritic cells, frac 2 | pCMVSport 3.0 | LP08 |
| HMUA HMUB HMUC | Myoloid Progenitor Cell Line | pCMVSport 3.0 | LP08 |
| HHEA HHEB HHEC HHED | T Cell helper I | pCMVSport 3.0 | LP08 |
| HHEM HHEN HHEO HHEP | T cell helper II | pCMVSport 3.0 | LP08 |
| HEQA HEQB HEQC | Human endometrial stromal cells | pCMVSport 3.0 | LP08 |
| HJMA HJMB | Human endometrial stromal cells-treated | pCMVSport 3.0 | LP08 |
| | with progesterone | | |
| HSWA HSWB HSWC | Human endometrial stromal cells-treated | pCMVSport 3.0 | LP08 |
| | with estradiol | | |
| HSYA HSYB HSYC | Human Thymus Stromal Cells | pCMVSport 3.0 | LP08 |
| HLWA HLWB HLWC | Human Placenta | pCMVSport 3.0 | LP08 |
| HRAA HRAB HRAC | Rejected Kidney, lib 4 | pCMVSport 3.0 | LP08 |
| HMTM | PCR, pBMC I/C treated | PCRII | LP09 |
| HMJA | H. Meniingima, M6 | pSport 1 | LP10 |
| HMKA HMKB HMKC HMKD HMKE | H. Meningima, M1 | pSport 1 | LP10 |
| HUSG HUSI | Human umbilical vein endothelial cells, | pSport 1 | LP10 |
| | IL-4 induced | | |
| HUSX HUSY | Human Umbilical Vein Endothelial | pSport 1 | LP10 |
| | Cells, uninduced | | |
| HOFA | Ovarian Tumor I, OV5232 | pSport 1 | LP10 |
| HCFA HCFB HCFC HCFD | T-Cell PHA 16 hrs | pSport 1 | LP10 |
| HCFL HCFM HCFN HCFO | T-Cell PHA 24 hrs | pSport 1 | LP10 |
| HADA HADC HADD HADE HADF | Human Adipose | pSport 1 | LP10 |
| HADG | | | |
| HOVA HOVB HOVC | Human Ovary | pSport 1 | LP10 |
| HTWB HTWC HTWD HTWE HTWF | Resting T-Cell Library, II | pSport 1 | LP10 |
| HMMA | Spleen metastic melanoma | pSport 1 | LP10 |
| HLYA HLYB HLYC HLYD HLYE | Spleen, Chronic lymphocytic leukemia | pSport 1 | LP10 |
| HCGA | CD34+ cell, I | pSport 1 | LP10 |
| HEOM HEON | Human Eosinophils | pSport 1 | LP10 |
| HTDA | Human Tonsil, Lib 3 | pSport 1 | LP10 |
| HSPA | Salivary Gland, Lib 2 | pSport 1 | LP10 |
| HCHA HCHB HCHC | Breast Cancer cell line, MDA 36 | pSport 1 | LP10 |
| HCHM HCHN | Breast Cancer Cell line, angiogenic | pSport 1 | LP10 |
| HCIA | Crohn's Disease | pSport 1 | LP10 |
| HDAA HDAB HDAC | HEL cell line | pSport 1 | LP10 |
| HABA | Human Astrocyte | pSport 1 | LP10 |
| HUFA HUFB HUFC | Ulcerative Colitus | pSport 1 | LP10 |
| HNTM | NTERA2 + retinoic acid, 14 days | pSport 1 | LP10 |
| HDQA | Primary Dendritic cells, CapFinder2, | pSport 1 | LP10 |
| | frac 1 | | |
| HDQM | Primary Dendritic Cells, CapFinder, frac 2 | pSport 1 | LP10 |
| HLDX | Human Liver, normal, CapFinder | pSport 1 | LP10 |
| HULA HULB HULC | Human Dermal Endothelial | pSport 1 | LP10 |
| | Cells, untreated | | |
| HUMA | Human Dermal Endothelial cells, treated | pSport 1 | LP10 |
| HCJA | Human Stromal Endometrial fibroblasts, | pSport 1 | LP10 |
| | untreated | | |
| HCJM | Human Stromal endometrial fibroblasts, | pSport 1 | LP10 |
| | treated w/ estradiol | | |
| HEDA | Human Stromal endometrial fibroblasts, | pSport 1 | LP10 |
| | treated with progesterone | | |
| HFNA | Human ovary tumor cell OV350721 | pSport 1 | LP10 |
| HKGA HKGB HKGC HKGD | Markel Cells | pSport 1 | LP10 |
| HISA HISB HISC | Pancreas Islet Cell Tumor | pSport 1 | LP10 |
| HLSA | Skin, burned | pSport 1 | LP10 |
| HBZA | Prostate, BPH, Lib 2 | pSport 1 | LP10 |
| HBZS | Prostate BPH, Lib 2, subtracted | pSport 1 | LP10 |
| HFIA HFIB HFIC | Synovial Fibroblasts (control) | pSport 1 | LP10 |
| HFIH HFII HFIJ | Synovial hypoxia | pSport 1 | LP10 |
| HFIT HFIU HFIV | Synovial IL-1/TNF stimulated | pSport 1 | LP10 |
| HGCA | Messangial cell, frac 1 | pSport 1 | LP10 |
| HMVA HMVB HMVC | Bone Marrow Stromal Cell, untreated | pSport 1 | LP10 |
| HFIX HFIY HFIZ | Synovial Fibroblasts (Il1/TNF), subt | pSport 1 | LP10 |
| HFOX HFOY HFOZ | Synovial hypoxia-RSF subtracted | pSport 1 | LP10 |
| HMQA HMQB HMQC HMQD | Human Activated Monocytes | Uni-ZAP XR | LP11 |
| HLIA HLIB HLIC | Human Liver | pCMVSport 1 | LP012 |
| HHBA HHBB HHBC HHBD HHBE | Human Heart | pCMVSport 1 | LP012 |
| HBBA HBBB | Human Brain | pCMVSport 1 | LP012 |
| HLJA HLJB HLJC HLJD HLJE | Human Lung | pCMVSport 1 | LP012 |
| HOGA HOGB HOGC | Ovarian Tumor | pCMVSport 2.0 | LP012 |
| HTJM | Human Tonsils, Lib 2 | pCMVSport 2.0 | LP012 |
| HAMF HAMG | KMH2 | pCMVSport 3.0 | LP012 |
| HAJA HAJB HAJC | L428 | pCMVSport 3.0 | LP012 |
| HWBA HWBB HWBC HWBD HWBE | Dendritic cells, pooled | pCMVSport 3.0 | LP012 |
| HWAA HWAB HWAC HWAD | Human Bone Marrow, treated | pCMVSport 3.0 | LP012 |
| HWAE | | | |
| HYAA HYAB HYAC | B Cell lymphoma | pCMVSport 3.0 | LP012 |
| HWHG HWHH HWHI | Healing groin wound, 6.5 hours post | pCMVSport 3.0 | LP012 |
| | incision | | |
| HWHP HWHQ HWHR | Healing groin wound; 7.5 hours post | pCMVSport 3.0 | LP012 |
| | incision | | |
| HARM | Healing groin wound - zero hr post- | pCMVSport 3.0 | LP012 |
| | incision (control) | | |
| HBIM | Olfactory epithelium; nasalcavity | pCMVSport 3.0 | LP012 |
| HWDA | Healing Abdomen wound; 70&90 min | pCMVSport 3.0 | LP012 |
| | post incision | | |
| HWEA | Healing Abdomen Wound; 15 days post | pCMVSport 3.0 | LP012 |
| | incision | | |
| HWJA | Healing Abdomen Wound; 21&29 days | pCMVSport 3.0 | LP012 |
| HNAL | Human tongue, frac 2 | pSport1 | LP012 |
| HMJA | H. Meniingima, M6 | pSport1 | LP012 |
| HMKA HMKB HMKC HMKD HMKE | H. Meningima, M1 | pSport1 | LP012 |
| HOFA | Ovarian Tumor I, OV5232 | pSport1 | LP012 |
| HCFA HCFB HCFC HCFD | T-Cell PHA 16 hrs | pSport1 | LP012 |
| HCFL HCFM HCFN HCFO | T-Cell PHA 24 hrs | pSport1 | LP012 |
| HMMA HMMB HMMC | Spleen metastic melanoma | pSport1 | LP012 |
| HTDA | Human Tonsil, Lib 3 | pSport1 | LP012 |
| HDBA | Human Fetal Thymus | pSport1 | LP012 |
| HDUA | Pericardium | pSport1 | LP012 |
| HBZA | Prostate, BPH, Lib 2 | pSport1 | LP012 |
| HWCA | Larynx tumor | pSport1 | LP012 |
| HWKA | Normal lung | pSport1 | LP012 |
| HSMB | Bone marrow stroma, treated | pSport1 | LP012 |
| HBHM | Normal trachea | pSport1 | LP012 |
| HLFC | Human Larynx | pSport1 | LP012 |
| HLRB | Siebben Polyposis | pSport1 | LP012 |
| HNIA | Mammary Gland | pSport1 | LP012 |
| HNJB | Palate carcinoma | pSport1 | LP012 |
| HNKA | Palate normal | pSport1 | LP012 |
| HMZA | Pharynx carcinoma | pSport1 | LP012 |
| HABG | Cheek Carcinoma | pSport1 | LP012 |
| HMZM | Pharynx Carcinoma | pSport1 | LP012 |
| HDRM | Larynx Carcinoma | pSport1 | LP012 |
| HVAA | Pancreas normal PCA4 No | pSport1 | LP012 |
| HICA | Tongue carcinoma | pSport1 | LP012 |
| HUKA HUKB HUKC HUKD HUKE | Human Uterine Cancer | Lambda ZAP II | LP013 |
| HFFA | Human Fetal Brain, random primed | Lambda ZAP II | LP013 |
| HTUA | Activated T-cell labeled with 4-thioluri | Lambda ZAP II | LP013 |
| HBQA | Early Stage Human Brain, random | Lambda ZAP II | LP013 |
| | primed | | |
| HMEB | Human microvascular Endothelial cells, | Lambda ZAP II | LP013 |
| | fract. B | | |
| HUSH | Human Umbilical Vein Endothelial cells, | Lambda ZAP II | LP013 |
| | fract. A, re-excision | | |
| HLQC HLQD | Hepatocellular tumor, re-excision | Lambda ZAP II | LP013 |
| HTWJ HTWK HTWL | Resting T-cell, re-excision | Lambda ZAP II | LP013 |
| HF6S | Human Whole 6 week Old Embryo (II), | pBluescript | LP013 |
| | subt | | |
| HHPS | Human Hippocampus, subtracted | pBluescript | LP013 |
| HL1S | LNCAP, differential expression | pBluescript | LP013 |
| HLHS HLHT | Early Stage Human Lung, Subtracted | pBluescript | LP013 |
| HSUS | Supt cells, cyclohexamide treated, | pBluescript | LP013 |
| | subtracted | | |
| HSUT | Supt cells, cyclohexamide treated, | pBluescript | LP013 |
| | differentially expressed | | |
| HSDS | H. Striatum Depression, subtracted | pBluescript | LP013 |
| HPTZ | Human Pituitary, Subtracted VII | pBluescript | LP013 |
| HSDX | H. Striatum Depression, subt II | pBluescript | LP013 |
| HSDZ | H. Striatum Depression, subt | pBluescript | LP013 |
| HPBA HPBB HPBC HPBD HPBE | Human Pineal Gland | pBluescript SK- | LP013 |
| HRTA | Colorectal Tumor | pBluescript SK- | LP013 |
| HSBA HSBB HSBC HSBM | HSC172 cells | pBluescript SK- | LP013 |
| HJAA HJAB HJAC HJAD | Jurkat T-cell G1 phase | pBluescript SK- | LP013 |
| HJBA HJBB HJBC HJBD | Jurkat T-cell, S1 phase | pBluescript SK- | LP013 |
| HTNA HTNB | Human Thyroid | pBluescript SK- | LP013 |
| HAHA HAHB | Human Adult Heart | Uni-ZAP XR | LP013 |
| HE6A | Whole 6 week Old Embryo | Uni-ZAP XR | LP013 |
| HFCA HFCB HFCC HFCD HFCE | Human Fetal Brain | Uni-ZAP XR | LP013 |
| HFKC HFKD HFKE HFKF HFKG | Human Fetal Kidney | Uni-ZAP XR | LP013 |
| HGBA HGBD HGBE HGBF HGBG | Human Gall Bladder | Uni-ZAP XR | LP013 |
| HPRA HPRB HPRC HPRD | Human Prostate | Uni-ZAP XR | LP013 |
| HTEA HTEB HTEC HTED HTEE | Human Testes | Uni-ZAP XR | LP013 |
| HTTA HTTB HTTC HTTD HTTE | Human Testes Tumor | Uni-ZAP XR | LP013 |
| HYBA HYBB | Human Fetal Bone | Uni-ZAP XR | LP013 |
| HFLA | Human Fetal Liver | Uni-ZAP XR | LP013 |
| HHFB HHFC HHFD HHFE HHFF | Human Fetal Heart | Uni-ZAP XR | LP013 |
| HUVB HUVC HUVD HUVE | Human Umbilical Vein, End. remake | Uni-ZAP XR | LP013 |
| HTHB HTHC HTHD | Human Thymus | Uni-ZAP XR | LP013 |
| HSTA HSTB HSTC HSTD | Human Skin Tumor | Uni-ZAP XR | LP013 |
| HTAA HTAB HTAC HTAD HTAE | Human Activated T-cells | Uni-ZAP XR | LP013 |
| HFEA HFEB HFEC | Human Fetal Epithelium (skin) | Uni-ZAP XR | LP013 |
| HJPA HJPB HJPC HJPD | Human Jurkat Membrane Bound | | |
| | Polysomes | | |
| HESA | Human Epithelioid Sarcoma | Uni-ZAP XR | LP013 |
| HALS | Human Adult Liver, Subtracted | Uni-ZAP XR | LP013 |
| HFTA HFTB HFTC HFTD | Human Fetal Dura Mater | Uni-ZAP XR | LP013 |
| HCAA HCAB HCAC | Cem cells, cyclohexamide treated | Uni-ZAP XR | LP013 |
| HRGA HRGB HRGC HRGD | Raji Cells, cyclohexamide treated | Uni-ZAP XR | LP013 |
| HE9A HE9B HE9C HE9D HE9E | Nine Week Old Early Stage Human | Uni-ZAP XR | LP013 |
| HSFA | Human Fibrosarcoma | Uni-ZAP XR | LP013 |
| HATA HATB HATC HATD HATE | Human Adrenal Gland Tumor | Uni-ZAP XR | LP013 |
| HTRA | Human Trachea Tumor | Uni-ZAP XR | LP013 |
| HE2A HE2D HE2E HE2H HE2I | 12 Week Old Early Stage Human | Uni-ZAP XR | LP013 |
| HE2B HE2C HE2F HE2G HE2P | 12 Week Old Early Stage Human, II | Uni-ZAP XR | LP013 |
| HNEA HNEB HNEC HNED HNEE | Human Neutrophil | Uni-ZAP XR | LP013 |
| HBGA | Human Primary Breast Cancer | Uni-ZAP XR | LP013 |
| HPTS HPTT HPTU | Human Pituitary, subtracted | Uni-ZAP XR | LP013 |
| HMQA HMQB HMQC HMQD | Human Activated Monocytes | Uni-ZAP XR | LP013 |
| HOAA HOAB HOAC | Human Osteosarcoma | Uni-ZAP XR | LP013 |
| HTOA HTOD HTOE HTOF HTOG | human tonsils | Uni-ZAP XR | LP013 |
| HMGB | Human OB MG63 control fraction I | Uni-ZAP XR | LP013 |
| HOPB | Human OB HOS control fraction I | Uni-ZAP XR | LP013 |
| HOQB | Human OP HOS treated (1 nM E2) | Uni-ZAP XR | LP013 |
| | fraction I | | |
| HAUA HAUB HAUC | Amniotic Cells - TNF induced | Uni-ZAP XR | LP013 |
| HAQA HAQB HAQC HAQD | Amniotic Cells - Primary Culture | Uni-ZAP XR | LP013 |
| HROA HROC | HUMAN STOMACH | Uni-ZAP XR | LP013 |
| HBJA HBJB HBJC HBJD HBJE | HUMAN B CELL LYMPHOMA | Uni-ZAP XR | LP013 |
| HODA HODB HODC HODD | human ovarian cancer | Uni-ZAP XR | LP013 |
| HCPA | Corpus Callosum | Uni-ZAP XR | LP013 |
| HSOA | stomach cancer (human) | Uni-ZAP XR | LP013 |
| HERA | SKIN | Uni-ZAP XR | LP013 |
| HMDA | Brain-medulloblastoma | Uni-ZAP XR | LP013 |
| HGLA HGLB HGLD | Glioblastoma | Uni-ZAP XR | LP013 |
| HWTA HWTB HWTC | wilm's tumor | Uni-ZAP XR | LP013 |
| HEAA | H. Atrophic Endometrium | Uni-ZAP XR | LP013 |
| HAPN HAPO HAPP HAPQ HAPR | Human Adult Pulmonary; re-excision | Uni-ZAP XR | LP013 |
| HLTG HLTH | Human T-cell lymphoma; re-excision | Uni-ZAP XR | LP013 |
| HAHC HAHD HAHE | Human Adult Heart; re-excision | Uni-ZAP XR | LP013 |
| HAGA HAGB HAGC HAGD HAGE | Human Amygdala | Uni-ZAP XR | LP013 |
| HSJA HSJB HSJC | Smooth muscle-ILb induced | Uni-ZAP XR | LP013 |
| HSHA HSHB HSHC | Smooth muscle, IL1b induced | Uni-ZAP XR | LP013 |
| HPWA HPWB HPWC HPWD HPWE | Prostate BPH | Uni-ZAP XR | LP013 |
| HPIA HPIB HPIC | LNCAP prostate cell line | Uni-ZAP XR | LP013 |
| HPJA HPJB HPJC | PC3 Prostate cell line | Uni-ZAP XR | LP013 |
| HBTA | Bone Marrow Stroma, TNF&LPS ind | Uni-ZAP XR | LP013 |
| HMCF HMCG HMCH HMCI HMCJ | Macrophage-oxLDL; re-excision | Uni-ZAP XR | LP013 |
| HAGG HAGH HAGI | Human Amygdala; re-excision | Uni-ZAP XR | LP013 |
| HACA | H. Adipose Tissue | Uni-ZAP XR | LP013 |
| HKFB | K562 + PMA (36 hrs), re-excision | ZAP Express | LP013 |
| HCWT HCWU HCWV | CD34 positive cells (cord blood), re-ex | ZAP Express | LP013 |
| HBWA | Whole brain | ZAP Express | LP013 |
| HBXA HBXB HBXC HBXD | Human Whole Brain #2 - Oligo dt > | ZAP Express | LP013 |
| | 1.5 Kb | | |
| HAVM | Temporal cortex-Alzheimer | pT-Adv | LP014 |
| HAVT | Hippocampus, Alzheimer Subtracted | pT-Adv | LP014 |
| HHAS | CHME Cell Line | Uni-ZAP XR | LP014 |
| HAJR | Larynx normal | pSport 1 | LP014 |
| HWLE HWLF HWLG HWLH | Colon Normal | pSport 1 | LP014 |
| HCRM HCRN HCRO | Colon Carcinoma | pSport 1 | LP014 |
| HWLI HWLJ HWLK | Colon Normal | pSport 1 | LP014 |
| HWLQ HWLR HWLS HWLT | Colon Tumor | pSport 1 | LP014 |
| HBFM | Gastrocnemius Muscle | pSport 1 | LP014 |
| HBOD HBOE | Quadriceps Muscle | pSport 1 | LP014 |
| HBKD HBKE | Soleus Muscle | pSport 1 | LP014 |
| HCCM | Pancreatic Langerhans | pSport 1 | LP014 |
| HWGA | Larynx carcinoma | pSport 1 | LP014 |
| HWGM HWGN | Larynx carcinoma | pSport 1 | LP014 |
| HWLA HWLB HWLC | Normal colon | pSport 1 | LP014 |
| HWLM HWLN | Colon Tumor | pSport 1 | LP014 |
| HVAM HVAN HVAO | Pancreas Tumor | pSport 1 | LP014 |
| HWGQ | Larynx carcinoma | pSport 1 | LP014 |
| HAQM HAQN | Salivary Gland | pSport 1 | LP014 |
| HASM | Stomach; normal | pSport 1 | LP014 |
| HBCM | Uterus; normal | pSport 1 | LP014 |
| HCDM | Testis; normal | pSport 1 | LP014 |
| HDJM | Brain; normal | pSport 1 | LP014 |
| HEFM | Adrenal Gland, normal | pSport 1 | LP014 |
| HBAA | Rectum normal | pSport 1 | LP014 |
| HFDM | Rectum tumour | pSport 1 | LP014 |
| HGAM | Colon, normal | pSport 1 | LP014 |
| HHMM | Colon, tumour | pSport 1 | LP014 |
| HCLB HCLC | Human Lung Cancer | Lambda Zap II | LP015 |
| HRLA | L1 Cell line | ZAP Express | LP015 |
| HHAM | Hypothalamus, Alzheimer's | pCMVSport 3.0 | LP015 |
| HKBA | Ku 812F Basophils Line | pSport 1 | LP015 |
| HS2S | Saos2, Dexamethosome Treated | pSport 1 | LP016 |
| HA5A | Lung Carcinoma A549 TNFalpha | pSport 1 | LP016 |
| | activated | | |
| HTFM | TF-1 Cell Line GM-CSF Treated | pSport 1 | LP016 |
| HYAS | Thyroid Tumour | pSport 1 | LP016 |
| HUTS | Larynx Normal | pSport 1 | LP016 |
| HXOA | Larynx Tumor | pSport 1 | LP016 |
| HEAH | Ea.hy.926 cell line | pSport 1 | LP016 |
| HINA | Adenocarcinoma Human | pSport 1 | LP016 |
| HRMA | Lung Mesothelium | pSport 1 | LP016 |
| HLCL | Human Pre-Differentiated Adipocytes | Uni-ZAP XR | LP017 |
| HS2A | Saos2 Cells | pSport 1 | LP020 |
| HS2I | Saos2 Cells; Vitamin D3 Treated | pSport 1 | LP020 |
| HUCM | CHME Cell Line, untreated | pSport 1 | LP020 |
| HEPN | Aryepiglottis Normal | pSport 1 | LP020 |
| HPSN | Sinus Piniformis Tumour | pSport 1 | LP020 |
| HNSA | Stomach Normal | pSport 1 | LP020 |
| HNSM | Stomach Tumour | pSport 1 | LP020 |
| HNLA | Liver Normal Met5No | pSport 1 | LP020 |
| HUTA | Liver Tumour Met 5 Tu | pSport 1 | LP020 |
| HOCN | Colon Normal | pSport 1 | LP020 |
| HOCT | Colon Tumor | pSport 1 | LP020 |
| HTNT | Tongue Tumour | pSport 1 | LP020 |
| HLXN | Larynx Normal | pSport 1 | LP020 |
| HLXT | Larynx Tumour | pSport 1 | LP020 |
| HTYN | Thymus | pSport 1 | LP020 |
| HPLN | Placenta | pSport 1 | LP020 |
| HTNG | Tongue Normal | pSport 1 | LP020 |
| HZAA | Thyroid Normal (SDCA2 No) | pSport 1 | LP020 |
| HWES | Thyroid Thyroiditis | pSport 1 | LP020 |
| HFHD | Ficolled Human Stromal Cells, 5Fu | pTrip1Ex2 | LP021 |
| | treated | | |
| HFHM, HFHN | Ficolled Human Stromal Cells, Untreated | pTRIP1Ex2 | LP021 |
| HPCI | Hep G2 Cells, lambda library | lambda Zap-CMV XR | LP021 |
| HBCA, HBCB, HBCC | H. Lymph node breast Cancer | Uni-ZAP XR | LP021 |
| HCOK | Chondrocytes | pSPORT1 | LP022 |
| HDCA, HDCB, HDCC | Dendritic Cells From CD34 Cells | pSPORT1 | LP022 |
| HDMA, HDMB | CD40 activated monocyte dendritic cells | pSPORT1 | LP022 |
| HDDM, HDDN, HDDO | LPS activated derived dendritic cells | pSPORT1 | LP022 |
| HPCR | Hep G2 Cells, PCR library | lambda ZAP-CMV XR | LP022 |
| HAAA, HAAB, HAAC | Lung, Cancer (4005313A3): Invasive | pSPORT1 | LP022 |
| | Poorly Differentiated Lung | | |
| | Adenocarcinoma | | |
| HIPA, HIPB, HIPC | Lung, Cancer (4005163 B7): Invasive, | pSPORT1 | LP022 |
| | Poorly Diff. Adenocarcinoma, Metastatic | | |
| HOOH, HOOI | Ovary, Cancer: (4004562 B6) Papillary | pSPORT1 | LP022 |
| | Serous Cystic Neoplasm, Low Malignant | | |
| | Pot | | |
| HIDA | Lung, Normal: (4005313 B1) | pSPORT1 | LP022 |
| HUJA, HUJB, HUJC, HUJD, HUJE | B-Cells | pCMVSport 3.0 | LP022 |
| HNOA, HNOB, HNOC, HNOD | Ovary, Normal: (9805C040R) | pSPORT1 | LP022 |
| HNLM | Lung, Normal: (4005313 B1) | pSPORT1 | LP022 |
| HSCL | Stromal Cells | pSPORT1 | LP022 |
| HAAX | Lung, Cancer: (4005313 A3) Invasive | pSPORT1 | LP022 |
| | Poorly-differentiated Metastatic lung | | |
| | adenocarcinoma | | |
| HUUA, HUUB, HUUC, HUUD | B-cells (unstimulated) | pTrip1Ex2 | LP022 |
| HWWA, HWWB, HWWC, HWWD, | B-cells (stimulated) | pSPORT1 | LP022 |
| HWWE, HWWF, HWWG | | | |
| HCCC | Colon, Cancer: (9808C064R) | pCMVSport 3.0 | LP023 |
| HPDO HPDP HPDQ HPDR HPD | Ovary, Cancer (9809C332): Poorly | pSport1 | LP023 |
| | differentiated adenocarcinoma | | |
| HPCO HPCP HPCQ HPCT | Ovary, Cancer (15395A1F) Grade II | pSport1 | LP023 |
| | Papillary Carcinoma | | |
| HOCM HOCO HOCP HOCQ | Ovary, Cancer: (15799A1F) Poorly | pSport1 | LP023 |
| | differentiated carcinoma | | |
| HCBM HCBN HCBO | Breast, Cancer: (4004943 A5) | pSport1 | LP023 |
| HNBT HNBU HNBV | Breast, Normal: (4005522B2) | pSport1 | LP023 |
| HBCP HBCQ | Breast, Cancer: (4005522 A2) | pSport1 | LP023 |
| HBCJ | Breast, Cancer: (9806C012R) | pSport1 | LP023 |
| HSAM HSAN | Stromal cells 3.88 | pSport1 | LP023 |
| HVCA HVCB HVCC HVCD | Ovary, Cancer: (4004332 A2) | pSport1 | LP023 |
| HSCK HSEN HSEO | Stromal cells (HBM3.18) | pSport1 | LP023 |
| HSCP HSCQ | stromal cell clone 2.5 | pSport1 | LP023 |
| HUXA | Breast Cancer: (4005385 A2) | pSport1 | LP023 |
| HCOM HCON HCOO HCOP HCOQ | Ovary, Cancer (4004650 A3): Well- | pSport1 | LP023 |
| | Differentiated Micropapillary Serous | | |
| | Carcinoma | | |
| HBNM | Breast, Cancer: (9802C020E) | pSport1 | LP023 |
| HVVA HVVB HVVC HVVD HVVE | Human Bone Marrow, treated | pSport1 | LP023 |

[0883] Two nonlimiting examples are provided below for isolating a particular clone from the deposited sample of plasmid cDNAs cited for that clone in Table 7. First, a plasmid is directly isolated by screening the clones using a polynucleotide probe corresponding to the nucleotide sequence of SEQ ID NO:X.

[0884] Particularly, a specific polynucleotide with 30-40 nucleotides is synthesized using an Applied Biosystems DNA synthesizer according to the sequence reported. The oligonucleotide is labeled, for instance, with ³²P-γ-ATP using T4 polynucleotide kinase and purified according to routine methods. (E.g., Maniatis et al., Molecular Cloning: A Laboratory Manual, Cold Spring Harbor Press, Cold Spring, N.Y. (1982)). The plasmid mixture is transformed into a suitable host, as indicated above (such as XL-1 Blue (Stratagene)) using techniques known to those of skill in the art, such as those provided by the vector supplier or in related publications or patents cited above. The transformants are plated on 1.5% agar plates (containing the appropriate selection agent, e.g., ampicillin) to a density of about 150 transfonnants (colonies) per plate. These plates are screened using Nylon membranes according to routine methods for bacterial colony screening (e.g., Sambrook et al., Molecular Cloning: A Laboratory Manual, 2nd Edit., (1989), Cold Spring Harbor Laboratory Press, pages 1.93 to 1.104), or other techniques known to those of skill in the art.

[0885] This modified RNA preparation is used as a template for first strand cDNA synthesis using a gene specific oligonucleotide. The first strand synthesis reaction is used as a template for PCR amplification of the desired 5′ end using a primer specific to the ligated RNA oligonucleotide and a primer specific to the known sequence of the gene of interest. The resultant product is then sequenced and analyzed to confirm that the 5′ end sequence belongs to the desired gene.

### Example 2

### Isolation of Genomic Clones Corresponding to a Polynucleotide

[0886] A human genomic P1 library (Genomic Systems, Inc.) is screened by PCR using primers selected for the sequence corresponding to SEQ ID NO:X according to the method described in Example 1. (See also, Sambrook.)

### Example 3

### Tissue Specific Expression Analysis

[0887] The Human Genome Sciences, Inc. (HGS) database is derived from sequencing tissue and/or disease specific cDNA libraries. Libraries generated from a particular tissue are selected and the specific tissue expression pattern of EST groups or assembled contigs within these libraries is determined by comparison of the expression patterns of those groups or contigs within the entire database. ESTs and assembled contigs which show tissue specific expression are selected.

[0888] The original clone from which the specific EST sequence was generated, or in the case of an assembled contig, the clone from which the 5′ most EST sequence was generated, is obtained from the catalogued library of clones and the insert amplified by PCR using methods known in the art. The PCR product is denatured and then transferred in 96 or 384 well format to a nylon membrane (Schleicher and Scheull) generating an array filter of tissue specific clones. Housekeeping genes, maize genes, and known tissue specific genes are included on the filters. These targets can be used in signal normalization and to validate assay sensitivity. Additional targets are included to monitor probe length and specificity of hybridization.

[0889] Radioactively labeled hybridization probes are generated by first strand cDNA synthesis per the manufacturer's instructions (Life Technologies) from mRNA/RNA samples prepared from the specific tissue being analyzed (e.g., prostate, prostate cancer, ovarian, ovarian cancer, etc.). The hybridization probes are purified by gel exclusion chromatography, quantitated, and hybridized with the array filters in hybridization bottles at 65° C. overnight. The filters are washed under stringent conditions and signals are captured using a Fuji phosphorimager.

[0890] Data is extracted using AIS software and following background subtraction, signal normalization is performed. This includes a normalization of filter-wide expression levels between different experimental runs. Genes that are differentially expressed in the tissue of interest are identified.

### Example 4

### Chromosomal Mapping of the Polynucleotides

[0891] An oligonucleotide primer set is designed according to the sequence at the 5′ end of SEQ ID NO:X. This primer preferably spans about 100 nucleotides. This primer set is then used in a polymerase chain reaction under the following set of conditions: 30 seconds, 95° C.; 1 minute, 56° C.; 1 minute, 70° C. This cycle is repeated 32 times followed by one 5 minute cycle at 70° C. Human, mouse, and hamster DNA is used as template in addition to a somatic cell hybrid panel containing individual chromosomes or chromosome fragments (Bios, Inc). The reactions are analyzed on either 8% polyacrylamide gels or 3.5% agarose gels. Chromosome mapping is determined by the presence of an approximately 100 bp PCR fragment in the particular somatic cell hybrid.

### Example 5

### Bacterial Expression of a Polypeptide

[0892] A polynucleotide encoding a polypeptide of the present invention is amplified using PCR oligonucleotide primers corresponding to the 5′ and 3′ ends of the DNA sequence, as outlined in Example 1, to synthesize insertion fragments. The primers used to amplify the cDNA insert should preferably contain restriction sites, such as BamHI and XbaI, at the 5′ end of the primers in order to clone the amplified product into the expression vector. For example, BamHI and XbaI correspond to the restriction enzyme sites on the bacterial expression vector pQE-9. (Qiagen, Inc., Chatsworth, Calif.). This plasmid vector encodes antibiotic resistance (Amp^{r}), a bacterial origin of replication (ori), an IPTG-regulatable promoter/operator (P/O), a ribosome binding site (RBS), a 6-histidine tag (6-His), and restriction enzyme cloning sites.

[0893] The pQE-9 vector is digested with BamHI and XbaI and the amplified fragment is ligated into the pQE-9 vector maintaining the reading frame initiated at the bacterial RBS. The ligation mixture is then used to transform the E. coli strain M15/rep4 (Qiagen, Inc.) which contains multiple copies of the plasmid pREP4, which expresses the laci repressor and also confers kanamycin resistance (Kanr). Transformants are identified by their ability to grow on LB plates and ampicillin/kanamycin resistant colonies are selected. Plasmid DNA is isolated and confirmed by restriction analysis.

[0894] Clones containing the desired constructs are grown overnight (O/N) in liquid culture in LB media supplemented with both Amp (100 ug/ml) and Kan (25 ug/ml). The O/N culture is used to inoculate a large culture at a ratio of 1:100 to 1:250. The cells are grown to an optical density 600 (O.D.⁶⁰⁰) of between 0.4 and 0.6. IPTG (Isopropyl-B-D-thiogalacto pyranoside) is then added to a final concentration of 1 mM. IPTG induces by inactivating the lac repressor, clearing the P/O leading to increased gene expression.

[0895] Cells are grown for an extra 3 to 4 hours. Cells are then harvested by centrifugation (20 mins at 600× g). The cell pellet is solubilized in the chaotropic agent 6 Molar Guanidine HCl by stirring for 3-4 hours at 4° C. The cell debris is removed by centrifugation, and the supernatant containing the polypeptide is loaded onto a nickel-nitrilo-tri-acetic acid (“Ni-NTA”) affinity resin column (available from QIAGEN, Inc., supra). Proteins with a 6× His tag bind to the Ni-NTA resin with high affinity and can be purified in a simple one-step procedure (for details see: The QIAexpressionist (1995) QIAGEN, Inc., supra).

[0896] Briefly, the supernatant is loaded onto the column in 6 M guanidine-HCl, pH 8. The column is first washed with 10 volumes of 6 M guanidine-HCl, pH 8, then washed with 10 volumes of 6 M guanidine-HCl pH 6, and finally the polypeptide is eluted with 6 M guanidine-HCl, pH 5.

[0897] The purified protein is then renatured by dialyzing it against phosphate-buffered saline (PBS) or 50 mM Na-acetate, pH 6 buffer plus 200 mM NaCl. Alternatively, the protein can be successfully refolded while immobilized on the Ni-NTA column. The recommended conditions are as follows: renature using a linear 6M-1M urea gradient in 500 mM NaCl, 20% glycerol, 20 mM Tris/HCl pH 7.4, containing protease inhibitors. The renaturation should be performed over a period of 1.5 hours or more. After renaturation the proteins are eluted by the addition of 250 mM immidazole. Immidazole is removed by a final dialyzing step against PBS or 50 mM sodium acetate pH 6 buffer plus 200 mM NaCl. The purified protein is stored at 4° C. or frozen at −80° C.

[0898] In addition to the above expression vector, the present invention further includes an expression vector, called pHE4a (ATCC Accession Number 209645, deposited on Feb. 25, 1998) which contains phage operator and promoter elements operatively linked to a polynucleotide of the present invention, called pHE4a. (ATCC Accession Number 209645, deposited on Feb. 25, 1998.) This vector contains: 1) a neomycinphosphotransferase gene as a selection marker, 2) an E. coli origin of replication, 3) a T5 phage promoter sequence, 4) two lac operator sequences, 5) a Shine-Delgarno sequence, and 6) the lactose operon repressor gene (lacIq). The origin of replication (oriC) is derived from pUC19 (LTI, Gaithersburg, Md.). The promoter and operator sequences are made synthetically.

[0899] DNA can be inserted into the pHE4a by restricting the vector with NdeI and XbaI, BamHI, XhoI, or Asp718, running the restricted product on a gel, and isolating the larger fragment (the stuffer fragment should be about 310 base pairs). The DNA insert is generated according to the PCR protocol described in Example 1, using PCR primers having restriction sites for NdeI (5′ primer) and XbaI, BaniHI, XhoI, or Asp718 (3′ primer). The PCR insert is gel purified and restricted with compatible enzymes. The insert and vector are ligated according to standard protocols.

[0900] The engineered vector could easily be substituted in the above protocol to express protein in a bacterial system.

### Example 6

### Purification of a Polypeptide from an Inclusion Body

[0901] The following alternative method can be used to purify a polypeptide expressed in E. coli when it is present in the form of inclusion bodies. Unless otherwise specified, all of the following steps are conducted at 4-10° C.

[0902] Upon completion of the production phase of the E. coli fermentation, the cell culture is cooled to 4-10° C. and the cells harvested by continuous centrifugation at 15,000 rpm (Heraeus Sepatech). On the basis of the expected yield of protein per unit weight of cell paste and the amount of purified protein required, an appropriate amount of cell paste, by weight, is suspended in a buffer solution containing 100 mM Tris, 50 mM EDTA, pH 7.4. The cells are dispersed to a homogeneous suspension using a high shear mixer.

[0903] The cells are then lysed by passing the solution through a microfluidizer (Microfuidics, Corp. or APV Gaulin, Inc.) twice at 4000-6000 psi. The homogenate is then mixed with NaCl solution to a final concentration of 0.5 M NaCl, followed by centrifugation at 7000× g for 15 min. The resultant pellet is washed again using 0.5M NaCl, 100 mM Tris, 50 mM EDTA, pH 7.4.

[0904] The resulting washed inclusion bodies are solubilized with 1.5 M guanidine hydrochloride (GuHCl) for 2-4 hours. After 7000 xg centrifugation for 15 min., the pellet is discarded and the polypeptide containing supernatant is incubated at 4° C. overnight to allow further GuHCl extraction.

[0905] Following high speed centrifugation (30,000× g) to remove insoluble particles, the GuHCl solubilized protein is refolded by quickly mixing the GuHCl extract with 20 volumes of buffer containing 50 mM sodium, pH 4.5, 150 mM NaCl, 2 mM EDTA by vigorous stirring. The refolded diluted protein solution is kept at 4° C. without mixing for 12 hours prior to further purification steps.

[0906] To clarify the refolded polypeptide solution, a previously prepared tangential filtration unit equipped with 0.16 μm membrane filter with appropriate surface area (e.g., Filtron), equilibrated with 40 mM sodium acetate, pH 6.0 is employed. The filtered sample is loaded onto a cation exchange resin (e.g., Poros HS-50, Perseptive Biosystems). The column is washed with 40 mM sodium acetate, pH 6.0 and eluted with 250 mM, 500 mM, 1000 mM, and 1500 mM NaCl in the same buffer, in a stepwise manner. The absorbance at 280 nm of the effluent is continuously monitored. Fractions are collected and further analyzed by SDS-PAGE.

[0907] Fractions containing the polypeptide are then pooled and mixed with 4 volumes of water. The diluted sample is then loaded onto a previously prepared set of tandem columns of strong anion (Poros HQ-50, Perseptive Biosystems) and weak anion (Poros CM-20, Perseptive Biosystems) exchange resins. The columns are equilibrated with 40 mM sodium acetate, pH 6.0. Both columns are washed with 40 mM sodium acetate, pH 6.0, 200 mM NaCl. The CM-20 column is then eluted using a 10 column volume linear gradient ranging from 0.2 M NaCl, 50 mM sodium acetate, pH 6.0 to 1.0 M NaCl, 50 mM sodium acetate, pH 6.5. Fractions are collected under constant A₂₈₀ monitoring of the effluent. Fractions containing the polypeptide (determined, for instance, by 16% SDS-PAGE) are then pooled.

[0908] The resultant polypeptide should exhibit greater than 95% purity after the above refolding and purification steps. No major contaminant bands should be observed from Commassie blue stained 16% SDS-PAGE gel when 5 μg of purified protein is loaded. The purified protein can also be tested for endotoxin/LPS contamination, and typically the LPS content is less than 0.1 ng/ml according to LAL assays.

### Example 7

### Cloning and Expression of a Polypeptide in a Baculovirus Expression System

[0909] In this example, the plasmid shuttle vector pA2 is used to insert a polynucleotide into a baculovirus to express a polypeptide. This expression vector contains the strong polyhedrin promoter of the Autographa californica nuclear polyhedrosis virus (AcMNPV) followed by convenient restriction sites such as BamHI, Xba I and Asp7l8. The polyadenylation site of the simian virus 40 (“SV40”) is used for efficient polyadenylation. For easy selection of recombinant virus, the plasmid contains the beta-galactosidase gene from E. coli under control of a weak Drosophila promoter in the same orientation, followed by the polyadenylation signal of the polyhedrin gene. The inserted genes are flanked on both sides by viral sequences for cell-mediated homologous recombination with wild-type viral DNA to generate a viable virus that express the cloned polynucleotide.

[0910] Many other baculovirus vectors can be used in place of the vector above, such as pAc373, pVL941, and pAcIM1, as one skilled in the art would readily appreciate, as long as the construct provides appropriately located signals for transcription, translation, secretion and the like, including a signal peptide and an in-frame AUG as required. Such vectors are described, for instance, in Luckow et al., Virology 170:31-39 (1989).

[0911] Specifically, the cDNA sequence contained in the deposited clone, including the AUG initiation codon, is amplified using the PCR protocol described in Example 1. If a naturally occurring signal sequence is used to produce the polypeptide of the present invention, the pA2 vector does not need a second signal peptide. Alternatively, the vector can be modified (pA2 GP) to include a baculovirus leader sequence, using the standard methods described in Summers et al., “A Manual of Methods for Baculovirus Vectors and Insect Cell Culture Procedures,” Texas Agricultural Experimental Station Bulletin No. 1555 (1987).

[0912] The amplified fragment is isolated from a 1% agarose gel using a commercially available kit (“Geneclean,” BIO 101 Inc., La Jolla, Calif.). The fragment then is digested with appropriate restriction enzymes and again purified on a 1% agarose gel.

[0913] The plasmid is digested with the corresponding restriction enzymes and optionally, can be dephosphorylated using calf intestinal phosphatase, using routine procedures known in the art. The DNA is then isolated from a 1% agarose gel using a commercially available kit (“Geneclean” BIO 101 Inc., La Jolla, Calif.).

[0914] The fragment and the dephosphorylated plasmid are ligated together with T4 DNA ligase. E. coli HB101 or other suitable E. coli hosts such as XL-1 Blue (Stratagene Cloning Systems, La Jolla, Calif.) cells are transformed with the ligation mixture and spread on culture plates. Bacteria containing the plasmid are identified by digesting DNA from individual colonies and analyzing the digestion product by gel electrophoresis. The sequence of the cloned fragment is confirmed by DNA sequencing.

[0915] Five μg of a plasmid containing the polynucleotide is co-transfected with 1.0 μg of a commercially available linearized baculovirus DNA (“BaculoGold™ baculovirus DNA, Pharmingen, San Diego, Calif.), using the lipofection method described by Felgner et al., Proc. Natl. Acad. Sci. USA 84:7413-7417 (1987). One μg of BaculoGold™ virus DNA and 5 μg of the plasmid are mixed in a sterile well of a microtiter plate containing 50 μl of serum-free Grace's medium (Life Technologies Inc., Gaithersburg, Md.). Afterwards, 10 μl Lipofectin plus 90 μl Grace's medium are added, mixed and incubated for 15 minutes at room temperature. Then the transfection mixture is added drop-wise to Sf9 insect cells (ATCC CRL 1711) seeded in a 35 mm tissue culture plate with 1 ml Grace's medium without serum. The plate is then incubated for 5 hours at 27° C. The transfection solution is then removed from the plate and 1 ml of Grace's insect medium supplemented with 10% fetal calf serum is added. Cultivation is then continued at 27° C. for four days.

[0916] After four days the supernatant is collected and a plaque assay is performed, as described by Summers and Smith, supra. An agarose gel with “Blue Gal” (Life Technologies Inc., Gaithersburg) is used to allow easy identification and isolation of gal-expressing clones, which produce blue-stained plaques. (A detailed description of a “plaque assay” of this type can also be found in the user's guide for insect cell culture and baculovirology distributed by Life Technologies Inc., Gaithersburg, page 9-10.) After appropriate incubation, blue stained plaques are picked with the tip of a micropipettor (e.g., Eppendorf). The agar containing the recombinant viruses is then resuspended in a microcentrifuge tube containing 200 μl of Grace's medium and the suspension containing the recombinant baculovirus is used to infect Sf9 cells seeded in 35 mm dishes. Four days later the supernatants of these culture dishes are harvested and then they are stored at 4° C.

[0917] To verify the expression of the polypeptide, Sf9 cells are grown in Grace's medium supplemented with 10% heat-inactivated FBS. The cells are infected with the recombinant baculovirus containing the polynucleotide at a multiplicity of infection (“MOI”) of about 2. If radiolabeled proteins are desired, 6 hours later the medium is removed and is replaced with SF900 II medium minus methionine and cysteine (available from Life Technologies Inc., Rockville, Md.). After 42 hours, 5 μCi of ³⁵S-methionine and 5 μCi ³⁵S-cysteine (available from Amersham) are added. The cells are further incubated for 16 hours and then are harvested by centrifugation. The proteins in the supernatant as well as the intracellular proteins are analyzed by SDS-PAGE followed by autoradiography (if radiolabeled).

[0918] Microsequencing of the amino acid sequence of the amino terminus of purified protein may be used to determine the amino terminal sequence of the produced protein.

### Example 8

### Expression of a Polypeptide in Mammalian Cells

[0919] The polypeptide of the present invention can be expressed in a mammalian cell. A typical mammalian expression vector contains a promoter element, which mediates the initiation of transcription of mRNA, a protein coding sequence, and signals required for the termination of transcription and polyadenylation of the transcript. Additional elements include enhancers, Kozak sequences and intervening sequences flanked by donor and acceptor sites for RNA splicing. Highly efficient transcription is achieved with the early and late promoters from SV40, the long terminal repeats (LTRs) from Retroviruses, e.g., RSV, HTLVI, HIVI and the early promoter of the cytomegalovirus (CMV). However, cellular elements can also be used (e.g., the human actin promoter).

[0920] Suitable expression vectors for use in practicing the present invention include, for example, vectors such as pSVL and pMSG (Pharmacia, Uppsala, Sweden), pRSVcat (ATCC 37152), pSV2dhfr (ATCC 37146), pBC12MI (ATCC 67109), pCMVSport 2.0, and pCMVSport 3.0. Mammalian host cells that could be used include, human Hela, 293, H9 and Jurkat cells, mouse NIH3T3 and C127 cells, Cos 1, Cos 7 and CVI, quail QC1-3 cells, mouse L cells and Chinese hamster ovary (CHO) cells.

[0921] Alternatively, the polypeptide can be expressed in stable cell lines containing the polynucleotide integrated into a chromosome. The co-transfection with a selectable marker such as DHFR, gpt, neomycin, or hygromycin allows the identification and isolation of the transfected cells.

[0922] The transfected gene can also be amplified to express large amounts of the encoded protein. The DHFR (dihydrofolate reductase) marker is useful in developing cell lines that carry several hundred or even several thousand copies of the gene of interest. (See, e.g., Alt, F. W., et al., J. Biol. Chem. 253:1357-1370 (1978); Hamlin, J. L. and Ma, C., Biochem. et Biophys. Acta, 1097:107-143 (1990); Page, M. J. and Sydenham, M. A., Biotechnology 9:64-68 (1991)). Another useful selection marker is the enzyme glutamine synthase (GS) (Murphy et al., Biochem J. 227:277-279 (1991); Bebbington et al., Bio/Technology 10:169-175 (1992). Using these markers, the mammalian cells are grown in selective medium and the cells with the highest resistance are selected. These cell lines contain the amplified gene(s) integrated into a chromosome. Chinese hamster ovary (CHO) and NSO cells are often used for the production of proteins.

[0923] Derivatives of the plasmid pSV2-dhfr (ATCC Accession No. 37146), the expression vectors pC4 (ATCC Accession No. 209646) and pC6 (ATCC Accession No.209647) contain the strong promoter (LTR) of the Rous Sarcoma Virus (Cullen et al., Molecular and Cellular Biology, 438-447 (March, 1985)) plus a fragment of the CMV-enhancer (Boshart et al., Cell 41:521-530 (1985)). Multiple cloning sites, e.g., with the restriction enzyme cleavage sites BamHI, XbaI and Asp718, facilitate the cloning of the gene of interest. The vectors also contain the 3′ intron, the polyadenylation and termination signal of the rat preproinsulin gene, and the mouse DHFR gene under control of the SV40 early promoter.

[0924] Specifically, the plasmid pC6, for example, is digested with appropriate restriction enzymes and then dephosphorylated using calf intestinal phosphates by procedures known in the art. The vector is then isolated from a 1% agarose gel.

[0925] A polynucleotide of the present invention is amplified according to the protocol outlined in Example 1. If a naturally occurring signal sequence is used to produce the polypeptide of the present invention, the vector does not need a second signal peptide. Alternatively, if a naturally occurring signal sequence is not used, the vector can be modified to include a heterologous signal sequence. (See, e.g., International Publication No. WO 96/34891.)

[0926] The amplified fragment is isolated from a 1% agarose gel using a commercially available kit (“Geneclean,” BIO 101 Inc., La Jolla, Ca.). The fragment then is digested with appropriate restriction enzymes and again purified on a 1% agarose gel.

[0927] The amplified fragment is then digested with the same restriction enzyme and purified on a 1% agarose gel. The isolated fragment and the dephosphorylated vector are then ligated with T4 DNA ligase. E. coli HB101 or XL-1 Blue cells are then transformed and bacteria are identified that contain the fragment inserted into plasmid pC6 using, for instance, restriction enzyme analysis.

[0928] Chinese hamster ovary cells lacking an active DHFR gene is used for transfection. Five μg of the expression plasmid pC6 or pC4 is cotransfected with 0.5 μg of the plasmid pSVneo using lipofectin (Felgner et al., supra). The plasmid pSV2-neo contains a dominant selectable marker, the neo gene from Tn5 encoding an enzyme that confers resistance to a group of antibiotics including G418. The cells are seeded in alpha minus MEM supplemented with 1 mg/ml G418. After 2 days, the cells are trypsinized and seeded in hybridoma cloning plates (Greiner, Germany) in alpha minus MEM supplemented with 10, 25, or 50 ng/ml of methotrexate plus 1 mg/ml G418. After about 10-14 days single clones are trypsinized and then seeded in 6-well petri dishes or 10 ml flasks using different concentrations of methotrexate (50 nM, 100 nM, 200 nM, 400 nM, 800 nM). Clones growing at the highest concentrations of methotrexate are then transferred to new 6-well plates containing even higher concentrations of methotrexate (1 μM, 2 μM, 5 μM, 10 mM, 20 mM). The same procedure is repeated until clones are obtained which grow at a concentration of 100-200 μM. Expression of the desired gene product is analyzed, for instance, by SDS-PAGE and Western blot or by reversed phase HPLC analysis.

### Example 9

### Protein Fusions

[0929] The polypeptides of the present invention are preferably fused to other proteins. These fusion proteins can be used for a variety of applications. For example, fusion of the present polypeptides to His-tag, HA-tag, protein A, IgG domains, and maltose binding protein facilitates purification. (See Example 5; see also EP A 394,827; Traunecker, et al., Nature 331:84-86 (1988)). Similarly, fusion to IgG-1, IgG-3, and albumin increases the halflife time in vivo. Nuclear localization signals fused to the polypeptides of the present invention can target the protein to a specific subcellular localization, while covalent heterodimer or homodimers can increase or decrease the activity of a fusion protein. Fusion proteins can also create chimeric molecules having more than one function. Finally, fusion proteins can increase solubility and/or stability of the fused protein compared to the non-fused protein. All of the types of fusion proteins described above can be made by modifying the following protocol, which outlines the fusion of a polypeptide to an IgG molecule, or the protocol described in Example 5.

[0930] Briefly, the human Fc portion of the IgG molecule can be PCR amplified, using primers that span the 5′ and 3′ ends of the sequence described below. These primers also should have convenient restriction enzyme sites that will facilitate cloning into an expression vector, preferably a mammalian expression vector.

[0931] For example, if pC4 (ATCC Accession No. 209646) is used, the human Fc portion can be ligated into the BamHI cloning site. Note that the 3′ BamHI site should be destroyed. Next, the vector containing the human Fc portion is re-restricted with BamHI, linearizing the vector, and a polynucleotide of the present invention, isolated by the PCR protocol described in Example 1, is ligated into this BamHI site. Note that the polynucleotide is cloned without a stop codon, otherwise a fusion protein will not be produced.

[0932] If the naturally occurring signal sequence is used to produce the polypeptide of the present invention, pC4 does not need a second signal peptide. Alternatively, if the naturally occurring signal sequence is not used, the vector can be modified to include a heterologous signal sequence. (See, e.g., International Publication No. WO 96/34891.)

| | |
|---|---|
| Human IgG Fc region: | |
| GGGATCCGGAGCCCAAATCTTCTGACAAAACTCACACATGCCCACCGTGCCCAG | (SEQ ID NO: 1) |
| CACCTGAATTCGAGGGTGCACCGTCAGTCTTCCTCTTCCCCCCAAAACCCAAGGA | |
| CACCCTCATGATCTCCCGGACTCCTGAGGTCACATGCGTGGTGGTGGACGTAAGC | |
| CACGAAGACCCTGAGGTCAAGTTCAACTGGTACGTGGACGGCGTGGAGGTGCAT | |
| AATGCCAAGACAAAGCCGCGGGAGGAGCAGTACAACAGCACGTACCGTGTGGTC | |
| AGCGTCCTCACCGTCCTGCACCAGGACTGGCTGAATGGCAAGGAGTACAAGTGC | |
| AAGGTCTCCAACAAAGCCCTCCCAACCCCCATCGAGAAAACCATCTCCAAAGCC | |
| AAAGGGCAGCCCCGAGAACCACAGGTGTACACCCTGCCCCCATCCCGGGATGAG | |
| CTGACCAAGAACCAGGTCAGCCTGACCTGCCTGGTCAAAGGCTTCTATCCAAGC | |
| GACATCGCCGTGGAGTGGGAGAGCAATGGGCAGCCGGAGAACAACTACAAGAC | |
| CACGCCTCCCGTGCTGGACTCCGACGGCTCCTTCTTCCTCTACAGCAAGCTCACC | |
| GTGGACAAGAGCAGGTGGCAGCAGGGGAACGTCTTCTCATGCTCCGTGATGCAT | |
| GAGGCTCTGCACAACCACTACACGCAGAAGAGCCTCTCCCTGTCTCCGGGTAAAT | |
| GAGTGCGACGGCCGCGACTCTAGAGGAT | |

### Example 10

### Production of an Antibody from a Polypeptide

[0933] a) Hybridoma Technology

[0934] The antibodies of the present invention can be prepared by a variety of methods. (See, Current Protocols, Chapter 2.) As one example of such methods, cells expressing a polypeptide of the present invention are administered to an animal to induce the production of sera containing polyclonal antibodies. In a preferred method, a preparation of a a polypeptide of the present invention is prepared and purified to render it substantially free of natural contaminants. Such a preparation is then introduced into an animal in order to produce polyclonal antisera of greater specific activity.

[0935] Monoclonal antibodies specific for a polypeptide of the present invention are prepared using hybridoma technology (Kohler et al., Nature 256:495 (1975); Kohler et al., Eur. J. Immunol. 6:511 (1976); Kohler et al., Eur. J. Immunol. 6:292 (1976); Hammerling et al., in: Monoclonal Antibodies and T-Cell Hybridomas, Elsevier, N.Y., pp. 563-681 (1981)). hi general, an animal (preferably a mouse) is immunized with a polypeptide of the present invention or, more preferably, with a secreted polypeptide of the present invention-expressing cell. Such polypeptide-expressing cells are cultured in any suitable tissue culture medium, preferably in Earle's modified Eagle's medium supplemented with 10% fetal bovine serum (inactivated at about 56° C.), and supplemented with about 10 g/l of nonessential amino acids, about 1,000 U/ml of penicillin, and about 100 μg/ml of streptomycin.

[0936] The splenocytes of such mice are extracted and fused with a suitable myeloma cell line. Any suitable myeloma cell line may be employed in accordance with the present invention; however, it is preferable to employ the parent myeloma cell line (SP2O), available from the ATCC. After fusion, the resulting hybridoma cells are selectively maintained in HAT medium, and then cloned by limiting dilution as described by Wands et al. (Gastroenterology 80:225-232 (1981)). The hybridoma cells obtained through such a selection are then assayed to identify clones which secrete antibodies capable of binding the polypeptide of the present invention.

[0937] Alternatively, additional antibodies capable of binding to polypeptide of the present invention can be produced in a two-step procedure using anti-idiotypic antibodies. Such a method makes use of the fact that antibodies are themselves antigens, and therefore, it is possible to obtain an antibody which binds to a second antibody. In accordance with this method, protein specific antibodies are used to immunize an animal, preferably a mouse. The splenocytes of such an animal are then used to produce hybridoma cells, and the hybridoma cells are screened to identify clones which produce an antibody whose ability to bind to the polypeptide of the present invention-specific antibody can be blocked by polypeptide of the present invention. Such antibodies comprise anti-idiotypic antibodies to the polypeptide of the present invention-specific antibody and are used to immunize an animal to induce formation of further polypeptide of the present invention-specific antibodies.

[0938] For in vivo use of antibodies in humans, an antibody is “humanized”. Such antibodies can be produced using genetic constructs derived from hybridoma cells producing the monoclonal antibodies described above. Methods for producing chimeric and humanized antibodies are known in the art and are discussed herein. (See, for review, Morrison, Science 229:1202 (1985); Oi et al., BioTechniques 4:214 (1986); Cabilly et al., U.S. Pat. No. 4,816,567; Taniguchi et al., EP 171496; Morrison et al., EP 173494; Neuberger et al., WO 8601533; Robinson et al., International Publication No. WO 8702671; Boulianne et al., Nature 312:643 (1984); Neuberger et al., Nature 314:268 (1985)).

[0939] b) Isolation of Antibody Fragments Directed Against Polypeptide of the Present Invention from a Library of scFvs

[0940] Naturally occurring V-genes isolated from human PBLs are constructed into a library of antibody fragments which contain reactivities against polypeptide of the present invention to which the donor may or may not have been exposed (see e.g., U.S. Pat. No. 5,885,793 incorporated herein by reference in its entirety).

[0941] Rescue of the Library.

[0942] A library of scFvs is constructed from the RNA of human PBLs as described in International Publication No. WO 92/01047. To rescue phage displaying antibody fragments, approximately 10⁹ E. coli harboring the phagemid are used to inoculate 50 ml of 2× TY containing 1% glucose and 100 μg/ml of ampicillin (2xTY-AMP-GLU) and grown to an O.D. of 0.8 with shaking. Five ml of this culture is used to inoculate 50 ml of 2xTY-AMP-GLU, 2×10⁸ TU of delta gene 3 helper (M13 delta gene III, see International Publication No. WO 92/01047) are added and the culture incubated at 37° C. for 45 minutes without shaking and then at 37° C. for 45 minutes with shaking. The culture is centrifuged at 4000 r.p.m. for 10 min. and the pellet resuspended in 2 liters of 2xTY containing 100 μg/ml ampicillin and 50 ug/ml kanamycin and grown overnight. Phage are prepared as described in International Publication No. WO 92/01047.

[0943] M13 delta gene III is prepared as follows: M13 delta gene III helper phage does not encode gene III protein, hence the phage(mid) displaying antibody fragments have a greater avidity of binding to antigen. Infectious M13 delta gene III particles are made by growing the helper phage in cells harboring a pUC 19 derivative supplying the wild type gene III protein during phage morphogenesis. The culture is incubated for 1 hour at 37° C. without shaking and then for a further hour at 37° C. with shaking. Cells are spun down (IEC-Centra 8,400 r.p.m. for 10 min), resuspended in 300 ml 2xTY broth containing 100 μg ampicillin/ml and 25 μg kanamycin/ml (2xTY-AMP-KAN) and grown overnight, shaking at 37° C. Phage particles are purified and concentrated from the culture medium by two PEG-precipitations (Sambrook et al., 1990), resuspended in 2 ml PBS and passed through a 0.45 μm filter (Minisart NML; Sartorius) to give a final concentration of approximately 10¹³ transducing units/ml (ampicillin-resistant clones).

[0944] Panning of the Library.

[0945] Immunotubes (Nunc) are coated overnight in PBS with 4 ml of either 100 μg/ml or 10 μg/ml of a polypeptide of the present invention. Tubes are blocked with 2% Marvel-PBS for 2 hours at 37° C. and then washed 3 times in PBS. Approximately 10¹³ TU of phage is applied to the tube and incubated for 30 minutes at room temperature tumbling on an over and under turntable and then left to stand for another 1.5 hours. Tubes are washed 10 times with PBS 0.1% Tween-20 and 10 times with PBS. Phage are eluted by adding 1 ml of 100 mM triethylamine and rotating 15 minutes on an under and over turntable after which the solution is immediately neutralized with 0.5 ml of 1.0M Tris-HCl, pH 7.4. Phage are then used to infect 10 ml of mid-log E. coli TG1 by incubating eluted phage with bacteria for 30 minutes at 37° C. The E. coli are then plated on TYE plates containing 1% glucose and 100 μg/ml ampicillin. The resulting bacterial library is then rescued with delta gene 3 helper phage as described above to prepare phage for a subsequent round of selection. This process is then repeated for a total of 4 rounds of affinity purification with tube-washing increased to 20 times with PBS, 0.1% Tween-20 and 20 times with PBS for rounds 3 and 4.

[0946] Characterization of Binders.

[0947] Eluted phage from the 3rd and 4th rounds of selection are used to infect E. coli HB 2151 and soluble scFv is produced (Marks, et al., 1991) from single colonies for assay. ELISAs are performed with microtitre plates coated with either 10 pg/ml of the polypeptide of the present invention in 50 mM bicarbonate pH 9.6. Clones positive in ELISA are further characterized by PCR fingerprinting (see, e.g., International Publication No. WO 92/01047) and then by sequencing. These ELISA positive clones may also be further characterized by techniques known in the art, such as, for example, epitope mapping, binding affinity, receptor signal transduction, ability to block or competitively inhibit antibody/antigen binding, and competitive agonistic or antagonistic activity.

### Example 11

### Method of Determining Alterations in a Gene Corresponding to a Polynucleotide

[0948] RNA isolated from entire families or individual patients presenting with a phenotype of interest (such as a disease) is isolated. cDNA is then generated from these RNA samples using protocols known in the art. (See, Sambrook.) The cDNA is then used as a template for PCR, employing primers surrounding regions of interest in SEQ ID NO:X; and/or the nucleotide sequence of the cDNA contained in Clone ID NO:Z. Suggested PCR conditions consist of 35 cycles at 95 degrees C for 30 seconds; 60-120 seconds at 52-58 degrees C; and 60-120 seconds at 70 degrees C, using buffer solutions described in Sidransky et al., Science 252:706 (1991).

[0949] PCR products are then sequenced using primers labeled at their 5′ end with T4 polynucleotide kinase, employing SequiTherm Polymerase (Epicentre Technologies). The intron-exon boundaries of selected exons is also determined and genomic PCR products analyzed to confirm the results. PCR products harboring suspected mutations are then cloned and sequenced to validate the results of the direct sequencing.

[0950] PCR products are cloned into T-tailed vectors as described in Holton et al., Nucleic Acids Research, 19:1156 (1991) and sequenced with T7 polymerase (United States Biochemical). Affected individuals are identified by mutations not present in unaffected individuals.

[0951] Genomic rearrangements are also observed as a method of determining alterations in a gene corresponding to a polynucleotide. Genomic clones isolated according to Example 2 are nick-translated with digoxigenindeoxy-uridine 5′-triphosphate (Boehringer Manheim), and FISH performed as described in Johnson et al., Methods Cell Biol. 35:73-99 (1991). Hybridization with the labeled probe is carried out using a vast excess of human cot-i DNA for specific hybridization to the corresponding genomic locus.

[0952] Chromosomes are counterstained with 4,6-diamino-2-phenylidole and propidium iodide, producing a combination of C- and R-bands. Aligned images for precise mapping are obtained using a triple-band filter set (Chroma Technology, Brattleboro, VT) in combination with a cooled charge-coupled device camera (Photometrics, Tucson, AZ) and variable excitation wavelength filters. (Johnson et al., Genet. Anal. Tech. Appl., 8:75 (1991)). Image collection, analysis and chromosomal fractional length measurements are performed using the ISee Graphical Program System. (Inovision Corporation, Durham, N.C.) Chromosome alterations of the genomic region hybridized by the probe are identified as insertions, deletions, and translocations. These alterations are used as a diagnostic marker for an associated disease.

### Example 12

### Method of Detecting Abnormal Levels of a Polypeptide in a Biological Sample

[0953] A polypeptide of the present invention can be detected in a biological sample, and if an increased or decreased level of the polypeptide is detected, this polypeptide is a marker for a particular phenotype. Methods of detection are numerous, and thus, it is understood that one skilled in the art can modify the following assay to fit their particular needs.

[0954] For example, antibody-sandwich ELISAs are used to detect polypeptides in a sample, preferably a biological sample. Wells of a microtiter plate are coated with specific antibodies, at a final concentration of 0.2 to 10 ug/ml. The antibodies are either monoclonal or polyclonal and are produced by the method described in Example 10. The wells are blocked so that non-specific binding of the polypeptide to the well is reduced.

[0955] The coated wells are then incubated for >2 hours at RT with a sample containing the polypeptide. Preferably, serial dilutions of the sample should be used to validate results. The plates are then washed three times with deionized or distilled water to remove unbound polypeptide.

[0956] Next, 50 ul of specific antibody-alkaline phosphatase conjugate, at a concentration of 25-400 ng, is added and incubated for 2 hours at room temperature. The plates are again washed three times with deionized or distilled water to remove unbound conjugate.

[0957] Add 75 ul of 4-methylumbelliferyl phosphate (MUP) or p-nitrophenyl phosphate (NPP) substrate solution to each well and incubate 1 hour at room temperature. Measure the reaction by a microtiter plate reader. Prepare a standard curve, using serial dilutions of a control sample, and plot polypeptide concentration on the X-axis (log scale) and fluorescence or absorbance of the Y-axis (linear scale). Interpolate the concentration of the polypeptide in the sample using the standard curve.

### Example 13

### Formulation

[0958] The invention also provides methods of treatment and/or prevention of diseases or disorders (such as, for example, any one or more of the diseases or disorders disclosed herein) by administration to a subject of an effective amount of a Therapeutic. By therapeutic is meant polynucleotides or polypeptides of the invention (including fragments and variants), agonists or antagonists thereof, and/or antibodies thereto, in combination with a pharmaceutically acceptable carrier type (e.g., a sterile carrier).

[0959] The Therapeutic will be formulated and dosed in a fashion consistent with good medical practice, taking into account the clinical condition of the individual patient (especially the side effects of treatment with the Therapeutic alone), the site of delivery, the method of administration, the scheduling of administration, and other factors known to practitioners. The “effective amount” for purposes herein is thus determined by such considerations.

[0960] As a general proposition, the total pharmaceutically effective amount of the Therapeutic administered parenterally per dose will be in the range of about 1 ug/kg/day to 10 mg/kg/day of patient body weight, although, as noted above, this will be subject to therapeutic discretion. More preferably, this dose is at least 0.01 mg/kg/day, and most preferably for humans between about 0.01 and 1 mg/kg/day for the hormone. If given continuously, the Therapeutic is typically administered at a dose rate of about 1 ug/kg/hour to about 50 ug/kg/hour, either by 1-4 injections per day or by continuous subcutaneous infusions, for example, using a mini-pump. An intravenous bag solution may also be employed. The length of treatment needed to observe changes and the interval following treatment for responses to occur appears to vary depending on the desired effect.

[0961] Therapeutics can be are administered orally, rectally, parenterally, intracistemally, intravaginally, intraperitoneally, topically (as by powders, ointments, gels, drops or transdermal patch), bucally, or as an oral or nasal spray. “Pharmaceutically acceptable carrier” refers to a non-toxic solid, semisolid or liquid filler, diluent, encapsulating material or formulation auxiliary of any. The term “parenteral” as used herein refers to modes of administration which include intravenous, intramuscular, intraperitoneal, intrastemal, subcutaneous and intraarticular injection and infusion.

[0962] Therapeutics of the invention are also suitably administered by sustained-release systems. Suitable examples of sustained-release Therapeutics are administered orally, rectally, parenterally, intracistemally, intravaginally, intraperitoneally, topically (as by powders, ointments, gels, drops or transdermal patch), bucally, or as an oral or nasal spray. “Pharmaceutically acceptable carrier” refers to a non-toxic solid, semisolid or liquid filler, diluent, encapsulating material or formulation auxiliary of any type. The term “parenteral” as used herein refers to modes of administration which include intravenous, intramuscular, intraperitoneal, intrastemal, subcutaneous and intraarticular injection and infusion.

[0963] Therapeutics of the invention are also suitably administered by sustained-release systems. Suitable examples of sustained-release Therapeutics include suitable polymeric materials (such as, for example, semi-permeable polymer matrices in the form of shaped articles, e.g., films, or mirocapsules), suitable hydrophobic materials (for example as an emulsion in an acceptable oil) or ion exchange resins, and sparingly soluble derivatives (such as, for example, a sparingly soluble salt).

[0964] Sustained-release matrices include polylactides (U.S. Pat. No. 3,773,919, EP 58,481), copolymers of L-glutamic acid and gamma-ethyl-L-glutamate (Sidman et al., Biopolymers 22:547-556 (1983)), poly (2-hydroxyethyl methacrylate) (Langer et al., J. Biomed. Mater. Res. 15:167-277 (1981), and Langer, Chem. Tech. 12:98-105 (1982)), ethylene vinyl acetate (Langer et al., Id.) or poly-D-(−)-3-hydroxybutyric acid (EP 133,988).

[0965] Sustained-release Therapeutics also include liposomally entrapped Therapeutics of the invention (see generally, Langer, Science 249:1527-1533 (1990); Treat et al., in Liposomes in the Therapy of Infectious Disease and Cancer, Lopez-Berestein and Fidler (eds.), Liss, New York, pp. 317 -327 and 353-365 (1989)). Liposomes containing the Therapeutic are prepared by methods known per se: DE 3,218,121; Epstein et al., Proc. Natl. Acad. Sci. (USA) 82:3688-3692 (1985); Hwang et al., Proc. Natl. Acad. Sci.(USA) 77:4030-4034 (1980); EP 52,322; EP 36,676; EP 88,046; EP 143,949; EP 142,641; Japanese Pat. Appl. 83-118008; U.S. Pat. Nos. 4,485,045 and 4,544,545; and EP 102,324. Ordinarily, the liposomes are of the small (about 200-800 Angstroms) unilamellar type in which the lipid content is greater than about 30 mol. percent cholesterol, the selected proportion being adjusted for the optimal Therapeutic.

[0966] In yet an additional embodiment, the Therapeutics of the invention are delivered by way of a pump (see Langer, supra; Sefton, CRC Crit. Ref. Biomed. Eng. 14:201 (1987); Buchwald et al., Surgery 88:507 (1980); Saudek et al., N. Engl. J. Med. 321:574 (1989)).

[0967] Other controlled release systems are discussed in the review by Langer (Science 249:1527-1533 (1990)).

[0968] For parenteral administration, in one embodiment, the Therapeutic is formulated generally by mixing it at the desired degree of purity, in a unit dosage injectable form (solution, suspension, or emulsion), with a pharmaceutically acceptable carrier, i.e., one that is non-toxic to recipients at the dosages and concentrations employed and is compatible with other ingredients of the formulation. For example, the formulation preferably does not include oxidizing agents and other compounds that are known to be deleterious to the Therapeutic.

[0969] Generally, the formulations are prepared by contacting the Therapeutic uniformly and intimately with liquid carriers or finely divided solid carriers or both. Then, if necessary, the product is shaped into the desired formulation. Preferably the carrier is a parenteral carrier, more preferably a solution that is isotonic with the blood of the recipient. Examples of such carrier vehicles include water, saline, Ringer's solution, and dextrose solution. Non-aqueous vehicles such as fixed oils and ethyl oleate are also useful herein, as well as liposomes.

[0970] The carrier suitably contains minor amounts of additives such as substances that enhance isotonicity and chemical stability. Such materials are non-toxic to recipients at the dosages and concentrations employed, and include buffers such as phosphate, citrate, succinate, acetic acid, and other organic acids or their salts; antioxidants such as ascorbic acid; low molecular weight (less than about ten residues) polypeptides, e.g., polyarginine or tripeptides; proteins, such as serum albumin, gelatin, or immunoglobulins; hydrophilic polymers such as polyvinylpyrrolidone; amino acids, such as glycine, glutamic acid, aspartic acid, or arginine; monosaccharides, disaccharides, and other carbohydrates including cellulose or its derivatives, glucose, manose, or dextrins; chelating agents such as EDTA; sugar alcohols such as mannitol or sorbitol; counterions such as sodium; and/or nonionic surfactants such as polysorbates, poloxamers, or PEG.

[0971] The Therapeutic is typically formulated in such vehicles at a concentration of about 0.1 mg/ml to 100 mg/ml, preferably 1-10 mg/ml, at a pH of about 3 to 8. It will be understood that the use of certain of the foregoing excipients, carriers, or stabilizers will result in the formation of polypeptide salts.

[0972] Any pharmaceutical used for therapeutic administration can be sterile. Sterility is readily accomplished by filtration through sterile filtration membranes (e.g., 0.2 micron membranes). Therapeutics generally are placed into a container having a sterile access port, for example, an intravenous solution bag or vial having a stopper pierceable by a hypodermic injection needle.

[0973] Therapeutics ordinarily will be stored in unit or multi-dose containers, for example, sealed ampoules or vials, as an aqueous solution or as a lyophilized formulation for reconstitution. As an example of a lyophilized formulation, 10-ml vials are filled with 5 ml of sterile-filtered 1% (w/v) aqueous Therapeutic solution, and the resulting mixture is lyophilized. The infusion solution is prepared by reconstituting the lyophilized Therapeutic using bacteriostatic Water-for-Injection.

[0974] The invention also provides a pharmaceutical pack or kit comprising one or more containers filled with one or more of the ingredients of the Therapeutics of the invention. Associated with such container(s) can be a notice in the form prescribed by a governmental agency regulating the manufacture, use or sale of pharmaceuticals or biological products, which notice reflects approval by the agency of manufacture, use or sale for human administration. In addition, the Therapeutics may be employed in conjunction with other therapeutic compounds.

[0975] The Therapeutics of the invention may be administered alone or in combination with adjuvants. Adjuvants that may be administered with the Therapeutics of the invention include, but are not limited to, alum, alum plus deoxycholate (ImmunoAg), MTP-PE (Biocine Corp.), QS21 (Genentech, Inc.), BCG (e.g., THERACYS®), MPL and nonviable prepartions of Corynebacterium parvum. In a specific embodiment, Therapeutics of the invention are administered in combination with alum. In another specific embodiment, Therapeutics of the invention are administered in combination with QS-21. Further adjuvants that may be administered with the Therapeutics of the invention include, but are not limited to, Monophosphoryl lipid immunomodulator, AdjuVax 100a, QS-21, QS-18, CRL1005, Aluminum salts, MF-59, and Virosomal adjuvant technology. Vaccines that may be administered with the Therapeutics of the invention include, but are not limited to, vaccines directed toward protection against MMR (measles, mumps, rubella), polio, varicella, tetanus/diptheria, hepatitis A, hepatitis B, haemophilus influenzae B, whooping cough, pneumonia, influenza, Lyme's Disease, rotavirus, cholera, yellow fever, Japanese encephalitis, poliomyelitis, rabies, typhoid fever, and pertussis. Combinations may be administered either concomitantly, e.g., as an admixture, separately but simultaneously or concurrently; or sequentially. This includes presentations in which the combined agents are administered together as a therapeutic mixture, and also procedures in which the combined agents are administered separately but simultaneously, e.g., as through separate intravenous lines into the same individual. Administration “in combination” further includes the separate administration of one of the compounds or agents given first, followed by the second.

[0976] The Therapeutics of the invention may be administered alone or in combination with other therapeutic agents. Therapeutic agents that may be administered in combination with the Therapeutics of the invention, include but not limited to, chemotherapeutic agents, antibiotics, steroidal and non- steroidal anti-inflammatories, conventional immunotherapeutic agents, and/or therapeutic treatments described below. Combinations may be administered either concomitantly, e.g., as an admixture, separately but simultaneously or concurrently; or sequentially. This includes presentations in which the combined agents are administered together as a therapeutic mixture, and also procedures in which the combined agents are administered separately but simultaneously, e.g., as through separate intravenous lines into the same individual. Administration “in combination” further includes the separate administration of one of the compounds or agents given first, followed by the second.

[0977] In certain embodiments, Therapeutics of the invention are administered in combination with antiretroviral agents, nucleoside/nucleotide reverse transcriptase inhibitors (NRTIs), non-nucleoside reverse transcriptase inhibitors (NNRTIs), and/or protease inhibitors (PIs). NRTIs that may be administered in combination with the Therapeutics of the invention, include, but are not limited to, RETROVIR™ (zidovudine/AZT), VIDEX™ (didanosine/ddI), HIVID™ (zalcitabine/ddC), ZERIT™ (stavudine/d4T), EPIVIRTM (lamivudine/3TC), and COMBIVIR™ (zidovudine/lamivudine). NNRTIs that may be administered in combination with the Therapeutics of the invention, include, but are not limited to, VIRAMUNE™ (nevirapine), RESCRIPTOR™ (delavirdine), and SUSTIVA™ (efavirenz). Protease inhibitors that may be administered in combination with the Therapeutics of the invention, include, but are not limited to, CRIXIVAN™ (indinavir), NORVIR™ (ritonavir), INVIRASE™ (saquinavir), and VIRACEPT™ (nelfinavir). In a specific embodiment, antiretroviral agents, nucleoside reverse transcriptase inhibitors, non-nucleoside reverse transcriptase inhibitors, and/or protease inhibitors may be used in any combination with Therapeutics of the invention to treat AIDS and/or to prevent or treat HIV infection.

[0978] Additional NRTIs include LODENOSINE™ (F-ddA; an acid-stable adenosine NRTI; Triangle/Abbott; COVIRACIL™ (emtricitabine/FTC; structurally related to lamivudine (3TC) but with 3- to 10-fold greater activity in vitro; Triangle/Abbott); dOTC (BCH-10652, also structurally related to lamivudine but retains activity against a substantial proportion of lamivudine-resistant isolates; Biochem Pharma); Adefovir (refused approval for anti-HIV therapy by FDA; Gilead Sciences); PREVEON® (Adefovir Dipivoxil, the active prodrug of adefovir; its active form is PMEA-pp); TENOFOVIRTM (bis-POC PMPA, a PMPA prodrug; Gilead); DAPD/DXG (active metabolite of DAPD; Triangle/Abbott); D-D4FC (related to 3TC, with activity against AZT/3TC-resistant virus); GW420867X (Glaxo Wellcome); ZIAGENm (abacavir/159U89; Glaxo Wellcome Inc.); CS-87 (3′azido-2′,3′-dideoxyuridine; WO 99/66936); and S-acyl-2-thioethyl (SATE)-bearing prodrug forms of β-L-FD4C and β-L-FddC (WO 98/17281).

[0979] Additional NNRTIs include COACTINON™ (Emivirine/MKC-442, potent NNRTI of the HEPT class; Triangle/Abbott); CAPRAVIRIN™ (AG-1549/S-1153, a next generation NNRTI with activity against viruses containing the K103N mutation; Agouron); PNU-142721 (has 20- to 50-fold greater activity than its predecessor delavirdine and is active against K103N mutants; Pharmacia & Upjohn); DPC-961 and DPC-963 (second-generation derivatives of efavirenz, designed to be active against viruses with the K103Nmutation; DuPont); GW-420867X (has 25-fold greater activity than HBY097 and is active against K103N mutants; Glaxo Wellcome); CALANOLIDE A (naturally occurring agent from the latex tree; active against viruses containing either or both the Y181C and K103N mutations); and Propolis (WO 99/49830).

[0980] Additional protease inhibitors include LOPINAVIR™ (ABT378/r; Abbott Laboratories); BMS-232632 (an azapeptide; Bristol-Myres Squibb); TIPRANAVIR™ (PNU-140690, a non-peptic dihydropyrone; Pharmacia & Upjohn); PD-178390 (a nonpeptidic dihydropyrone; Parke-Davis); BMS 232632 (an azapeptide; Bristol-Myers Squibb); L-756,423 (an indinavir analog; Merck); DMP-450 (a cyclic urea compound; Avid & DuPont); AG- 1776 (a peptidomimetic with in vitro activity against protease inhibitor-resistant viruses; Agouron); VX-175/GW-433908 (phosphate prodrug of amprenavir; Vertex & Glaxo Welcome); CGP61755 (Ciba); and AGENERASETM (amprenavir; Glaxo Wellcome Inc.).

[0981] Additional antiretroviral agents include fusion inhibitors/gp41 binders. Fusion inhibitors/gp41 binders include T-20 (a peptide from residues 643-678 of the HIV gp41 transmembrane protein ectodomain which binds to gp41 in its resting state and prevents transformation to the fusogenic state; Trimeris) and T-1249 (a second-generation fusion inhibitor; Trimeris).

[0982] Additional antiretroviral agents include fusion inhibitors/chemokine receptor antagonists. Fusion inhibitors/chemokine receptor antagonists include CXCR4 antagonists such as AMD 3100 (a bicyclam), SDF-1 and its analogs, and ALX40-4C (a cationic peptide), T22 (an 18 amino acid peptide; Trimeris) and the T22 analogs T134 and T140; CCR5 antagonists such as RANTES (9-68), AOP-RANTES, NNY-RANTES, and TAK-779; and CCR5/CXCR4 antagonists such as NSC 651016 (a distamycin analog). Also included are CCR2B, CCR3, and CCR6 antagonists. Chemokine recpetor agonists such as RANTES, SDF-1, MIP-1α, MIP-1β, etc., may also inhibit fusion.

[0983] Additional antiretroviral agents include integrase inhibitors. Integrase inhibitors include dicaffeoylquinic (DFQA) acids; L-chicoric acid (a dicaffeoyltartaric (DCTA) acid); quinalizarin (QLC) and related anthraquinones; ZINTEVIR™ (AR 177, an oligonucleotide that probably acts at cell surface rather than being a true integrase inhibitor; Arondex); and naphthols such as those disclosed in WO 98/50347.

[0984] Additional antiretroviral agents include hydroxyurea-like compunds such as BCX-34 (a purine nucleoside phosphorylase inhibitor; Biocryst); ribonucleotide reductase inhibitors such as DIDOX™ (Molecules for Health); inosine monophosphate dehydrogenase (IMPDH) inhibitors sucha as VX-497 (Vertex); and mycopholic acids such as CellCept (mycophenolate mofetil; Roche).

[0985] Additional antiretroviral agents include inhibitors of viral integrase, inhibitors of viral genome nuclear translocation such as arylene bis(methylketone) compounds; inhibitors of HIV entry such as AOP-RANTES, NNY-RANTES, RANTES-IgG fusion protein, soluble complexes of RANTES and glycosaminoglycans (GAG), and AMD-3100; nucleocapsid zinc finger inhibitors such as dithiane compounds; targets of HIV Tat and Rev; and pharmacoenhancers such as ABT-378.

[0986] Other antiretroviral therapies and adjunct therapies include cytokines and lymphokines such as MIP-1α, MIP-1β, SDF-1α, IL-2, PROLEUKIN™ (aldesleukin/L2-7001; Chiron), IL-4, IL-10, IL-12, and IL-13; interferons such as IFN-α2a; antagonists of TNFs, NFκB, GM-CSF, M-CSF, and IL-10; agents that modulate immune activation such as cyclosporin and prednisone; vaccines such as Remune™ (HIV inmunogen), APL 400-003 (Apollon), recombinant gp120 and fragments, bivalent (B/E) recombinant envelope glycoprotein, rgp120CM235, MN rgp120, SF-2 rgp120, gp120/soluble CD4 complex, Delta JR-FL protein, branched synthetic peptide derived from discontinuous gp120 C3/C4 domain, fusion-competent immunogens, and Gag, Pol, Nef, and Tat vaccines; gene-based therapies such as genetic suppressor elements (GSEs; WO 98/54366), and intrakines (genetically modified CC chemokines targetted to the ER to block surface expression of newly synthesized CCR5 (Yang et al., PNAS 94:11567-72 (1997); Chen et al., Nat. Med. 3:1110-16 (1997)); antibodies such as the anti-CXCR4 antibody 12G5, the anti-CCR5 antibodies 2D7, 5C7, PA8, PA9, PA10, PAl 1, PA12, and PA14, the anti-CD4 antibodies Q4120 and RPA-T4, the anti-CCR3 antibody 7B11, the anti-gpl20 antibodies 17b, 48d, 447-52D, 257-D, 268-D and 50.1, anti-Tat antibodies, anti-TNF-α antibodies, and monoclonal antibody 33A; aryl hydrocarbon (AH) receptor agonists and antagonists such as TCDD, 3,3′,4,4′,5-pentachlorobiphenyl, 3,3′,4,4′-tetrachlorobiphenyl, and α-naphthoflavone (WO 98/30213); and antioxidants such as γ-L-glutamyl-L-cysteine ethyl ester (γ-GCE; WO 99/56764).

[0987] In a further embodiment, the Therapeutics of the invention are administered in combination with an antiviral agent. Antiviral agents that may be administered with the Therapeutics of the invention include, but are not limited to, acyclovir, ribavirin, amantadine, and remantidine.

[0988] In other embodiments, Therapeutics of the invention may be administered in combination with anti-opportunistic infection agents. Anti-opportunistic agents that may be administered in combination with the Therapeutics of the invention, include, but are not limited to, TRIMETHOPRIM-SULFAMETHOXAZOLE™, DAPSONE™, PENTAMIDINE™, ATOVAQUONE™, ISONIAZID™, RIFAMPIN™, PYRAZINAMIDE™, ETHAMBUTOL™, RIFABUTIN™, CLARITHROMYCIN™, AZITHROMYCIN™, GANCICLOVIR™, FOSCARNET™, CIDOFOVIR™, FLUCONAZOLE™, ITRACONAZOLE™, KETOCONAZOLE™, ACYCLOVIR™, FAMCICOLVIR™, PYRIMETHAMINE™, LEUCOVORIN™, NEUPOGEN™ (filgrastim/G-CSF), and LEUKINE™ (sargramostim/GM-CSF). In a specific embodiment, Therapeutics of the invention are used in any combination with TRIMETHOPRIMSULFAMETHOXAZOLE™, DAPSONE™, PENTAMIDINE™, and/or ATOVAQUONE™ to prophylactically treat or prevent an opportunistic Pneumocystis carinii pneumonia infection. In another specific embodiment, Therapeutics of the invention are used in any combination with ISONIAZID™, RIFAMPIN™, PYRAZINAMIDE™, and/or ETHAMBUTOL™ to prophylactically treat or prevent an opportunistic Mycobacterium avium complex infection. In another specific embodiment, Therapeutics of the invention are used in any combination with RIFABUTIN™, CLARITHROMYCIN™, and/or AZITHROMYCIN™ to prophylactically treat or prevent an opportunistic Mycobacterium tuberculosis infection. In another specific embodiment, Therapeutics of the invention are used in any combination with GANCICLOVIR™, FOSCARNET™, and/or CIDOFOVIR™ to prophylactically treat or prevent an opportunistic cytomegalovirus infection. In another specific embodiment, Therapeutics of the invention are used in any combination with FLUCONAZOLE™, ITRACONAZOLE™, and/or KETOCONAZOLE™ to prophylactically treat or prevent an opportunistic fungal infection. In another specific embodiment, Therapeutics of the invention are used in any combination with ACYCLOVIR™ and/or FAMCICOLVIR™ to prophylactically treat or prevent an opportunistic herpes simplex virus type I and/or type II infection. In another specific embodiment, Therapeutics of the invention are used in any combination with PYRIMETHAMINE™ and/or LEUCOVORIN™ to prophylactically treat or prevent an opportunistic Toxoplasma gondii infection. In another specific embodiment, Therapeutics of the invention are used in any combination with LEUCOVORIN™ and/or NEUPOGEN™ to prophylactically treat or prevent an opportunistic bacterial infection.

[0989] In a further embodiment, the Therapeutics of the invention are administered in combination with an antibiotic agent. Antibiotic agents that may be administered with the Therapeutics of the invention include, but are not limited to, amoxicillin, beta-lactamases, aminoglycosides, beta-lactam (glycopeptide), beta-lactamases, Clindamycin, chloramphenicol, cephalosporins, ciprofloxacin, erythromycin, fluoroquinolones, macrolides, metronidazole, penicillins, quinolones, rapamycin, rifampin, streptomycin, sulfonamide, tetracyclines, trimethoprim, trimethoprim-sulfamethoxazole, and vancomycin.

[0990] In other embodiments, Therapeutics of the invention are administered in combination with immunosuppressive agents. Immunosuppressive agents that may be administered in combination with the Therapeutics of the invention include, but are not limited to, steroids, cyclosporine, cyclosporine analogs, cyclophosphamide methylprednisone, prednisone, azathioprine, FK-506, 15-deoxyspergualin, and other immunosuppressive agents that act by suppressing the function of responding T cells. Other immunosuppressive agents that may be administered in combination with the Therapeutics of the invention include, but are not limited to, prednisolone, methotrexate, thalidomide, methoxsalen, rapamycin, leflunomide, mizoribine (BREDININTm), brequinar, deoxyspergualin, and azaspirane (SKF 105685), ORTHOCLONE OKT(3 (muromonab-CD3), SANDIMMUNE™, NEORAL™, SANGDYA™ (cyclosporine), PROGRAF® (FK506, tacrolimus), CELLCEPT® (mycophenolate motefil, of which the active metabolite is mycophenolic acid), IMURAN™ (azathioprine), glucocorticosteroids, adrenocortical steroids such as DELTASONE™ (prednisone) and HYDELTRASOL™ (prednisolone), FOLEX™ and MEXATE™ (methotrxate), OXSORALEN-ULTRATm (methoxsalen) and RAPAMUNE™ (sirolimus). In a specific embodiment, immunosuppressants may be used to prevent rejection of organ or bone marrow transplantation.

[0991] In an additional embodiment, Therapeutics of the invention are administered alone or in combination with one or more intravenous immune globulin preparations. Intravenous immune globulin preparations that may be administered with the Therapeutics of the invention include, but not limited to, GAMMAR™, IVEEGAM™, SANDOGLOBULIN™, GAMMAGARD S/D™, ATGAM™ (antithymocyte glubulin), and GAMIMUNE™. In a specific embodiment, Therapeutics of the invention are administered in combination with intravenous immune globulin preparations in transplantation therapy (e.g., bone marrow transplant).

[0992] In certain embodiments, the Therapeutics of the invention are administered alone or in combination with an anti-inflammatory agent. Anti-inflammatory agents that may be administered with the Therapeutics of the invention include, but are not limited to, corticosteroids (e.g. betamethasone, budesonide, cortisone, dexamethasone, hydrocortisone, methylprednisolone, prednisolone, prednisone, and triamcinolone), nonsteroidal anti-inflammatory drugs (e.g., diclofenac, diflunisal, etodolac, fenoprofen, floctafenine, flurbiprofen, ibuprofen, indomethacin, ketoprofen, meclofenamate, mefenamic acid, meloxicam, nabumetone, naproxen, oxaprozin, phenylbutazone, piroxicam, sulindac, tenoxicam, tiaprofenic acid, and tolmetin.), as well as antihistamines, aminoarylcarboxylic acid derivatives, arylacetic acid derivatives, arylbutyric acid derivatives, arylcarboxylic acids, arylpropionic acid derivatives, pyrazoles, pyrazolones, salicylic acid derivatives, thiazinecarboxamides, e-acetamidocaproic acid, S-adenosylmethionine, 3-amino-4-hydroxybutyric acid, amixetrine, bendazac, benzydamine, bucolome, difenpiramide, ditazol, emorfazone, guaiazulene, nabumetone, nimesulide, orgotein, oxaceprol, paranyline, perisoxal, pifoxime, proquazone, proxazole, and tenidap.

[0993] In an additional embodiment, the compositions of the invention are administered alone or in combination with an anti-angiogenic agent. Anti-angiogenic agents that may be administered with the compositions of the invention include, but are not limited to, Angiostatin (Entremed, Rockville, Md.), Troponin-1 (Boston Life Sciences, Boston, Mass.), anti-Invasive Factor, retinoic acid and derivatives thereof, paclitaxel (Taxol), Suramin, Tissue Inhibitor of Metalloproteinase-1, Tissue Inhibitor of Metalloproteinase-2, VEGI, Plasminogen Activator Inhibitor-1, Plasminogen Activator Inhibitor-2, and various forms of the lighter “d group” transition metals.

[0994] Lighter “d group” transition metals include, for example, vanadium, molybdenum, tungsten, titanium, niobium, and tantalum species. Such transition metal species may form transition metal complexes. Suitable complexes of the above-mentioned transition metal species include oxo transition metal complexes.

[0995] Representative examples of vanadium complexes include oxo vanadium complexes such as vanadate and vanadyl complexes. Suitable vanadate complexes include metavanadate and orthovanadate complexes such as, for example, ammonium metavanadate, sodium metavanadate, and sodium orthovanadate. Suitable vanadyl complexes include, for example, vanadyl acetylacetonate and vanadyl sulfate including vanadyl sulfate hydrates such as vanadyl sulfate mono- and trihydrates.

[0996] Representative examples of tungsten and molybdenum complexes also include oxo complexes. Suitable oxo tungsten complexes include tungstate and tungsten oxide complexes. Suitable tungstate complexes include ammonium tungstate, calcium tungstate, sodium tungstate dihydrate, and tungstic acid. Suitable tungsten oxides include tungsten (IV) oxide and tungsten (VI) oxide. Suitable oxo molybdenum complexes include molybdate, molybdenum oxide, and molybdenyl complexes. Suitable molybdate complexes include ammonium molybdate and its hydrates, sodium molybdate and its hydrates, and potassium molybdate and its hydrates. Suitable molybdenum oxides include molybdenum (VI) oxide, molybdenum (VI) oxide, and molybdic acid. Suitable molybdenyl complexes include, for example, molybdenyl acetylacetonate. Other suitable tungsten and molybdenum complexes include hydroxo derivatives derived from, for example, glycerol, tartaric acid, and sugars.

[0997] A wide variety of other anti-angiogenic factors may also be utilized within the context of the present invention. Representative examples include, but are not limited to, platelet factor 4; protamine sulphate; sulphated chitin derivatives (prepared from queen crab shells), (Murata et al., Cancer Res. 51:22-26, (1991)); Sulphated Polysaccharide Peptidoglycan Complex (SP- PG) (the finction of this compound may be enhanced by the presence of steroids such as estrogen, and tamoxifen citrate); Staurosporine; modulators of matrix metabolism, including for example, proline analogs, cishydroxyproline, d,L-3,4-dehydroproline, Thiaproline, alpha,alpha-dipyridyl, aminopropionitrile fumarate; 4-propyl-5-(4-pyridinyl)-2(3H)-oxazolone; Methotrexate; Mitoxantrone; Heparin; Interferons; 2 Macroglobulin-serum; ChIMP-3 (Pavloff et al., J. Bio. Chem. 267:17321-17326, (1992)); Chymostatin (Tomkinson et al., Biochem J. 286:475-480, (1992)); Cyclodextrin Tetradecasulfate; Eponemycin; Camptothecin; Fumagillin (Ingber et al., Nature 348:555-557, (1990)); Gold Sodium Thiomalate (“GST”; Matsubara and Ziff, J. Clin. Invest. 79:1440-1446, (1987)); anticollagenase-serum; alpha2-antiplasmin (Holmes et al., J. Biol. Chem. 262(4):1659-1664, (1987)); Bisantrene (National Cancer Institute); Lobenzarit disodium (N-(2)-carboxyphenyl-4- chloroanthronilic acid disodium or “CCA”; (Takeuchi et al., Agents Actions 36:312-316, (1992)); and metalloproteinase inhibitors such as BB94.

[0998] Additional anti-angiogenic factors that may also be utilized within the context of the present invention include Thalidomide, (Celgene, Warren, NJ); Angiostatic steroid; AGM-1470 (H. Brem and J. Folkman J Pediatr. Surg. 28:445-51 (1993)); an integrin alpha v beta 3 antagonist (C. Storgard et al., J Clin. Invest. 103:47-54 (1999)); carboxynaminolmidazole; Carboxyamidotriazole (CAI) (National Cancer Institute, Bethesda, Md.); Conbretastatin A-4 (CA4P) (OXiGENE, Boston, Mass.); Squalamine (Magainin Pharmaceuticals, Plymouth Meeting, Pa.); TNP-470, (Tap Pharmaceuticals, Deerfield, Ill.); ZD-0101 AstraZeneca (London, UK); APRA (CT2584); Benefin, Byrostatin-1 (SC339555); CGP-41251 (PKC 412); CM101; Dexrazoxane (ICRF187); DMXAA; Endostatin; Flavopridiol; Genestein; GTE; ImmTher; Iressa (ZD1839); Octreotide (Somatostatin); Panretin; Penacillamine; Photopoint; PI-88; Prinomastat (AG-3340) Purlytin; Suradista (FCE26644); Tamoxifen (Nolvadex); Tazarotene; Tetrathiomolybdate; Xeloda (Capecitabine); and 5-Fluorouracil.

[0999] Anti-angiogenic agents that may be administed in combination with the compounds of the invention may work through a variety of mechanisms including, but not limited to, inhibiting proteolysis of the extracellular matrix, blocking the function of endothelial cell-extracellular matrix adhesion molecules, by antagonizing the function of angiogenesis inducers such as growth factors, and inhibiting integrin receptors expressed on proliferating endothelial cells. Examples of anti-angiogenic inhibitors that interfere with extracellular matrix proteolysis and which may be administered in combination with the compositons of the invention include, but are not lmited to, AG-3340 (Agouron, La Jolla, Calif.), BAY-12-9566 (Bayer, West Haven, Conn.), BMS-275291 (Bristol Myers Squibb, Princeton, N.J.), CGS-27032A (Novartis, East Hanover, N.J.), Marimastat (British Biotech, Oxford, UK), and Metastat (Aetema, St-Foy, Quebec). Examples of anti-angiogenic inhibitors that act by blocking the function of endothelial cell-extracellular matrix adhesion molecules and which may be administered in combination with the compositons of the invention include, but are not lmited to, EMD-121974 (Merck KcgaA Darmstadt, Germany) and Vitaxin (Ixsys, La Jolla, Calif./Medimmune, Gaithersburg, Md.). Examples of anti-angiogenic agents that act by directly antagonizing or inhibiting angiogenesis inducers and which may be administered in combination with the compositons of the invention include, but are not Imited to, Angiozyme (Ribozyme, Boulder, Colo.), Anti-VEGF antibody (Genentech, S. San Francisco, Calif.), PTK-787/ZK-225846 (Novartis, Basel, Switzerland), SU-101 (Sugen, S. San Francisco, Calif.), SU-5416 (Sugen/ Pharmacia Upjohn, Bridgewater, NJ), and SU-6668 (Sugen). Other anti-angiogenic agents act to indirectly inhibit angiogenesis. Examples of indirect inhibitors of angiogenesis which may be administered in combination with the compositons of the invention include, but are not limited to, IM-862 (Cytran, Kirkland, Wash.), Interferon-alpha, IL-12 (Roche, Nutley, N.J.), and Pentosan polysulfate (Georgetown University, Washington, D.C.).

[1000] In particular embodiments, the use of compositions of the invention in combination with anti-angiogenic agents is contemplated for the treatment, prevention, and/or amelioration of an autoimmune disease, such as for example, an autoimmune disease described herein.

[1001] In a particular embodiment, the use of compositions of the invention in combination with anti-angiogenic agents is contemplated for the treatment, prevention, and/or amelioration of arthritis. In a more particular embodiment, the use of compositions of the invention in combination with anti-angiogenic agents is contemplated for the treatment, prevention, and/or amelioration of rheumatoid arthritis.

[1002] In another embodiment, the polynucleotides encoding a polypeptide of the present invention are administered in combination with an angiogenic protein, or polynucleotides encoding an angiogenic protein. Examples of angiogenic proteins that may be administered with the compositions of the invention include, but are not limited to, acidic and basic fibroblast growth factors, VEGF-1, VEGF-2, VEGF-3, epidermal growth factor alpha and beta, platelet-derived endothelial cell growth factor, platelet-derived growth factor, tumor necrosis factor alpha, hepatocyte growth factor, insulin-like growth factor, colony stimulating factor, macrophage colony stimulating factor, granulocyte/macrophage colony stimulating factor, and nitric oxide synthase.

[1003] In additional embodiments, compositions of the invention are administered in combination with a chemotherapeutic agent. Chemotherapeutic agents that may be administered with the Therapeutics of the invention include, but are not limited to alkylating agents such as nitrogen mustards (for example, Mechlorethamine, cyclophosphamide, Cyclophosphamide Ifosfamide, Melphalan (L-sarcolysin), and Chlorambucil), ethylenimines and methylmelamines (for example, Hexamethylmelamine and Thiotepa), alkyl sulfonates (for example, Busulfan), nitrosoureas (for example, Carmustine (BCNU), Lomustine (CCNU), Semustine (methyl-CCNU), and Streptozocin (streptozotocin)), triazenes (for example, Dacarbazine (DTIC; dimethyltriazenoimidazolecarboxamide)), folic acid analogs (for example, Methotrexate (amethopterin)), pyrimidine analogs (for example, Fluorouacil (5-fluorouracil; 5-FU), Floxuridine (fluorodeoxyuridine; FudR), and Cytarabine (cytosine arabinoside)), purine analogs and related inhibitors (for example, Mercaptopurine (6-mercaptopurine; 6-MP), Thioguanine (6-thioguanine; TG), and Pentostatin (2′-deoxycoformycin)), vinca alkaloids (for example, Vinblastine (VLB, vinblastine sulfate)) and Vincristine (vincristine sulfate)), epipodophyllotoxins (for example, Etoposide and Teniposide), antibiotics (for example, Dactinomycin (actinomycin D), Daunorubicin (daunomycin; rubidomycin), Doxorubicin, Bleomycin, Plicamycin (mithramycin), and Mitomycin (mitomycin C), enzymes (for example, L-Asparaginase), biological response modifiers (for example, Interferon-alpha and interferon-alpha-2b), platinum coordination compounds (for example, Cisplatin (cis-DDP) and Carboplatin), anthracenedione (Mitoxantrone), substituted ureas (for example, Hydroxyrea), methylhydrazine derivatives (for example, Procarbazine (N-methylhydrazine; MIH), adrenocorticosteroids (for example, Prednisone), progestins (for example, Hydroxyprogesterone caproate, Medroxyprogesterone, Medroxyprogesterone acetate, and Megestrol acetate), estrogens (for example, Diethylstilbestrol (DES), Diethylstilbestrol diphosphate, Estradiol, and Ethinyl estradiol), antiestrogens (for example, Tamoxifen), androgens (Testosterone proprionate, and Fluoxymesterone), antiandrogens (for example, Flutamide), gonadotropin-releasing horomone analogs (for example, Leuprolide), other hormones and hormone analogs (for example, methyltestosterone, estramustine, estramustine phosphate sodium, chlorotrianisene, and testolactone), and others (for example, dicarbazine, glutamic acid, and mitotane).

[1004] In one embodiment, the compositions of the invention are administered in combination with one or more of the following drugs: infliximab (also known as Remicade™ Centocor, Inc.), Trocade (Roche, RO-32-3555), Leflunomide (also known as Arava™ from Hoechst Marion Roussel), Kineret™ (an IL-1 Receptor antagonist also known as Anakinra from Amgen, Inc.)

[1005] In a specific embodiment, compositions of the invention are administered in combination with CHOP (cyclophosphamide, doxorubicin, vincristine, and prednisone) or combination of one or more of the components of CHOP. In one embodiment, the compositions of the invention are administered in combination with anti-CD20 antibodies, human monoclonal anti-CD20 antibodies. In another embodiment, the compositions of the invention are administered in combination with anti-CD20 antibodies and CHOP, or anti-CD20 antibodies and any combination of one or more of the components of CHOP, particularly cyclophosphamide and/or prednisone. In a specific embodiment, compositions of the invention are administered in combination with Rituximab. In a further embodiment, compositions of the invention are administered with Rituximab and CHOP, or Rituximab and any combination of one or more of the components of CHOP, particularly cyclophosphamide and/or prednisone. In a specific embodiment, compositions of the invention are administered in combination with tositumomab. In a further embodiment, compositions of the invention are administered with tositumomab and CHOP, or tositumomab and any combination of one or more of the components of CHOP, particularly cyclophosphamide and/or prednisone. The anti-CD20 antibodies may optionally be associated with radioisotopes, toxins or cytotoxic prodrugs.

[1006] In another specific embodiment, the compositions of the invention are administered in combination Zevalin™. In a further embodiment, compositions of the invention are administered with Zevalin™ and CHOP, or Zevalin™ and any combination of one or more of the components of CHOP, particularly cyclophosphamide and/or prednisone. ZevalinTM may be associated with one or more radisotopes. Particularly preferred isotopes are ⁹⁰Y and ¹¹¹In.

[1007] In an additional embodiment, the Therapeutics of the invention are administered in combination with cytokines. Cytokines that may be administered with the Therapeutics of the invention include, but are not limited to, IL2, IL3, IL4, IL5, IL6, IL7, IL10, IL12, IL13, IL15, anti-CD40, CD40L, IFN-gamma and TNF-alpha. In another embodiment, Therapeutics of the invention may be administered with any interleukin, including, but not limited to, IL-1alpha, IL-1beta, IL-2, IL-3, IL-4, IL-5, IL-6, IL-7, IL-8, IL-9, IL-10, IL-11, IL-12, IL-13, IL-14, IL-15, IL-16, IL-17, IL-18, IL-19, IL-20, and IL-21.

[1008] In one embodiment, the Therapeutics of the invention are administered in combination with members of the TNF family. TNF, TNF-related or TNF-like molecules that may be administered with the Therapeutics of the invention include, but are not limited to, soluble forms of TNF-alpha, lymphotoxin-alpha (LT-alpha, also known as TNF-beta), LT-beta (found in complex heterotrimer LT-alpha2-beta), OPGL, FasL, CD27L, CD30L, CD40L, 4-1BBL, DcR3, OX40L, TNF-gamma (International Publication No. WO 96/14328), AIM-I (International Publication No. WO 97/33899), endokine-alpha (International Publication No. WO 98/07880), OPG, and neutrokine-alpha (International Publication No. WO 98/18921, OX40, and nerve growth factor (NGF), and soluble forms of Fas, CD30, CD27, CD40 and 4-IBB, TR2 (International Publication No. WO 96/34095), DR3 (International Publication No. WO 97/33904), DR4 (International Publication No. WO 98/32856), TR5 (International Publication No. WO 98/30693), TRANK, TR9 (International Publication No. WO 98/56892),TRIO (International Publication No. WO 98/54202), 312C2 (International Publication No. WO 98/06842), and TR12, and soluble forms CD154, CD70, and CD153.

[1009] In an additional embodiment, the Therapeutics of the invention are administered in combination with angiogenic proteins. Angiogenic proteins that may be administered with the Therapeutics of the invention include, but are not limited to, Glioma Derived Growth Factor (GDGF), as disclosed in European Patent Number EP-399816; Platelet Derived Growth Factor-A (PDGF-A), as disclosed in European Patent Number EP-6821 10; Platelet Derived Growth Factor-B (PDGF-B), as disclosed in European Patent Number EP-282317; Placental Growth Factor (PlGF), as disclosed in International Publication Number WO 92/06194; Placental Growth Factor-2 (P1GF-2), as disclosed in Hauser et al., Growth Factors, 4:259-268 (1993); Vascular Endothelial Growth Factor (VEGF), as disclosed in International Publication Number WO 90/13649; Vascular Endothelial Growth Factor-A (VEGF-A), as disclosed in European Patent Number EP-506477; Vascular Endothelial Growth Factor-2 (VEGF-2), as disclosed in International Publication Number WO 96/39515; Vascular Endothelial Growth Factor B (VEGF-3); Vascular Endothelial Growth Factor B-1 86 (VEGF-B186), as disclosed in International Publication Number WO 96/26736; Vascular Endothelial Growth Factor-D (VEGF-D), as disclosed in International Publication Number WO 98/02543; Vascular Endothelial Growth Factor-D (VEGF-D), as disclosed in International Publication Number WO 98/07832; and Vascular Endothelial Growth Factor-E (VEGF-E), as disclosed in German Patent Number DE19639601. The above mentioned references are herein incorporated by reference in their entireties.

[1010] In an additional embodiment, the Therapeutics of the invention are administered in combination with Fibroblast Growth Factors. Fibroblast Growth Factors that may be administered with the Therapeutics of the invention include, but are not limited to, FGF-1, FGF-2, FGF-3, FGF-4, FGF-5, FGF-6, FGF-7, FGF-8, FGF-9, FGF-10, FGF-11, FGF-12, FGF-13, FGF-14, and FGF-15.

[1011] In an additional embodiment, the Therapeutics of the invention are administered in combination with hematopoietic growth factors. Hematopoietic growth factors that may be administered with the Therapeutics of the invention include, but are not limited to, granulocyte macrophage colony stimulating factor (GM-CSF) (sargramostim, LEUKINE™, PROKINE™), granulocyte colony stimulating factor (G-CSF) (filgrastim, NEUPOGEN™), macrophage colony stimulating factor (M-CSF, CSF-1) erythropoietin (epoetin alfa, EPOGEN™, PROCRIT™), stem cell factor (SCF, c-kit ligand, steel factor), megakaryocyte colony stimulating factor, PIXY321 (a GMCSF/IL-3 fusion protein), interleukins, especially any one or more of IL-1 through IL-12, interferon-gamma, or thrombopoietin.

[1012] In certain embodiments, Therapeutics of the present invention are administered in combination with adrenergic blockers, such as, for example, acebutolol, atenolol, betaxolol, bisoprolol, carteolol, labetalol, metoprolol, nadolol, oxprenolol, penbutolol, pindolol, propranolol, sotalol, and timolol.

[1013] In another embodiment, the Therapeutics of the invention are administered in combination with an antiarrhythmic drug (e.g., adenosine, amidoarone, bretylium, digitalis, digoxin, digitoxin, diliazem, disopyramide, esmolol, flecainide, lidocaine, mexiletine, moricizine, phenytoin, procainamide, N-acetyl procainamide, propafenone, propranolol, quinidine, sotalol, tocainide, and verapamil).

[1014] In another embodiment, the Therapeutics of the invention are administered in combination with diuretic agents, such as carbonic anhydrase-inhibiting agents (e.g., acetazolamide, dichlorphenamide, and methazolamide), osmotic diuretics (e.g., glycerin, isosorbide, mannitol, and urea), diuretics that inhibit Na⁺-K⁺-2Cl⁻ symport (e.g., furosemide, bumetanide, azosemide, piretanide, tripamide, ethacrynic acid, muzolimine, and torsemide), thiazide and thiazide-like diuretics (e.g., bendroflumethiazide, benzthiazide, chlorothiazide, hydrochlorothiazide, hydroflumethiazide, methyclothiazide, polythiazide, trichormethiazide, chlorthalidone, indapamide, metolazone, and quinethazone), potassium sparing diuretics (e.g., amiloride and triamterene), and mineralcorticoid receptor antagonists (e.g., spironolactone, canrenone, and potassium canrenoate).

[1015] In one embodiment, the Therapeutics of the invention are administered in combination with treatments for endocrine and/or hormone imbalance disorders. Treatments for endocrine and/or hormone imbalance disorders include, but are not limited to, ¹²⁷I, radioactive isotopes of iodine such as ¹³¹I and ¹²³I; recombinant growth hormone, such as HUMATROPE™ (recombinant somatropin); growth hormone analogs such as PROTROPIN™ (somatrem); dopamine agonists such as PARLODEL™ (bromocriptine); somatostatin analogs such as SANDOSTATIN™ (octreotide); gonadotropin preparations such as PREGNYL™, A.P.L.™ and PROFASI™ (chorionic gonadotropin (CG)), PERGONAL™ (menotropins), and METRODIN™ (urofollitropin (uFSH)); synthetic human gonadotropin releasing hormone preparations such as FACTREL™ and LUTREPULSE™ (gonadorelin hydrochloride); synthetic gonadotropin agonists such as LUPRON™ (leuprolide acetate), SUPPRELIN™ (histrelin acetate), SYNAREL™ (nafarelin acetate), and ZOLADEX™ (goserelin acetate); synthetic preparations of thyrotropin-releasing hormone such as RELEFACT TRH™ and THYPINONE™ (protirelin); recombinant human TSH such as THYROGEN™; synthetic preparations of the sodium salts of the natural isomers of thyroid hormones such as L-T₄™, SYNTHROID™ and LEVOTHROID™ (levothyroxine sodium), L-T₃™, CYTOMEL™ and TRIOSTAT™ (liothyroine sodium), and THYROLAR™ (liotrix); antithyroid compounds such as 6-n-propylthiouracil (propylthiouracil), 1-methyl-2-mercaptoimidazole and TAPAZOLE™ (methimazole), NEO-MERCAZOLE™ (carbimazole); beta-adrenergic receptor antagonists such as propranolol and esmolol; Ca²⁺ channel blockers; dexamethasone and iodinated radiological contrast agents such as TELEPAQUE™ (iopanoic acid) and ORAGRAFIN™ (sodium ipodate).

[1016] Additional treatments for endocrine and/or hormone imbalance disorders include, but are not limited to, estrogens or congugated estrogens such as ESTRACE™ (estradiol), ESTINYL™ (ethinyl estradiol), PREMARIN™, ESTRATAB™, ORTHO-EST™, OGEN™ and estropipate (estrone), ESTROVIS™ (quinestrol), ESTRADERM™ (estradiol), DELESTROGEN™ and VALERGEN™ (estradiol valerate), DEPO-ESTRADIOL CYPIONATE™ and ESTROJECT LA™ (estradiol cypionate); antiestrogens such as NOLVADEX™ (tamoxifen), SEROPHENE™ and CLOMID™ (clomiphene); progestins such as DURALUTN™ (hydroxyprogesterone caproate), MPA™ and DEPO-PROVERA™ (medroxyprogesterone acetate), PROVERA™ and CYCRPNM (MPA), MEGACE™ (megestrol acetate), NORLUTIN™ (norethindrone), and NORLUTATE™ and AYGESTIN™ (norethindrone acetate); progesterone implants such as NORPLANT SYSTEM™ (subdermal implants of norgestrel); antiprogestins such as RU 486™ (mifepristone); hormonal contraceptives such as ENOVID™ (norethynodrel plus mestranol), PROGESTASERT™ (intrauterine device that releases progesterone), LOESTRIN™, BREVICON™, MODICON™, GENORA™, NELONA™, NORINYL™, OVACON-35™ and OVACON-50™ (ethinyl estradiol/norethindrone), LEVLEN™, NORDETTE™, TRI-LEVLEN™ and TRIPHASIL-21™ (ethinyl estradiol/levonorgestrel) LO/OVRAL™ and OVRAL™ (ethinyl estradiol/norgestrel), DEMULEN™ (ethinyl estradiol/ethynodiol diacetate), NORINYL™, ORTHO-NOVUM™, NORETHIN™, GENORA™, and NELOVA™ (norethindrone/mestranol), DESOGEN™ and ORTHO-CEPT™ (ethinyl estradiol/desogestrel), ORTHO-CYCLEN™ and ORTHO-TRICYCLEN™ (ethinyl estradiol/norgestimate), MICRONOR™ and NOR-QD™ (norethindrone), and OVRETTE™ (norgestrel).

[1017] Additional treatments for endocrine and/or hormone imbalance disorders include, but are not limited to, testosterone esters such as methenolone acetate and testosterone undecanoate; parenteral and oral androgens such as TESTOJECT-50™ (testosterone), TESTEX™ (testosterone propionate), DELATESTRYL™ (testosterone enanthate), DEPO-TESTOSTERONE™ (testosterone cypionate), DANOCRINE™ (danazol), HALOTESTIN™ (fluoxymesterone), ORETON METHYL™, TESTRED™ and VIRILON™ (methyltestosterone), and OXANDRIN™ (oxandrolone); testosterone transdermal systems such as TESTODERM™; androgen receptor antagonist and 5-alpha-reductase inhibitors such as ANDROCUR™ (cyproterone acetate), EULEXIN™ (flutamide), and PROSCAR™ (finasteride); adrenocorticotropic hormone preparations such as CORTROSYN™ (cosyntropin); adrenocortical steroids and their synthetic analogs such as ACLOVATE™ (alclometasone dipropionate), CYCLOCORT™ (amcinonide), BECLOVENT™ and VANCERIL™ (beclomethasone dipropionate), CELESTONE™ (betamethasone), BENISONE™ and UTICORT™ (betamethasone benzoate), DIPROSONE™ (betamethasone dipropionate), CELESTONE PHOSPHATE™ (betamethasone sodium phosphate), CELESTONE SOLUSPAN™ (betamethasone sodium phosphate and acetate), BETA-VAL™ and VALISONE™ (betamethasone valerate), TEMOVATE™ (clobetasol propionate), CLODERM™ (clocortolone pivalate), CORTEF™ and HYDROCORTONE™ (cortisol (hydrocortisone)), HYDROCORTONE ACETATE™ (cortisol (hydrocortisone) acetate), LOCOID™ (cortisol (hydrocortisone) butyrate), HYDROCORTONE PHOSPHATE™ (cortisol (hydrocortisone) sodium phosphate), A-HYDROCORT™ and SOLU CORTEF™ (cortisol (hydrocortisone) sodium succinate), WESTCORT™ (cortisol (hydrocortisone) valerate), CORTISONE ACETATE™ (cortisone acetate), DESOWEN™ and TRIDESILON™ (desonide), TOPICORT™ (desoximetasone), DECADRON™ (dexamethasone), DECADRON LA™ (dexamethasone acetate), DECADRON PHOSPHATE™ and HEXADROL PHOSPHATE™ (dexamethasone sodium phosphate), FLORONE™ and MAXIFLOR™ (diflorasone diacetate), FLORINEF ACETATE™ (fludrocortisone acetate), AEROBID™ and NASALIDE™ (flunisolide), FLUONID™ and SYNALAR™ (fluocinolone acetonide), LIDEX™ (fluocinonide), FLUOR-OP™ and FML™ (fluorometholone), CORDRAN™ (flurandrenolide), HALOG™ (halcinonide), HMS LIZUIFILM™ (medrysone), MEDROL™ (methylprednisolone), DEPO-MEDROL™ and MEDROL ACETATE™ (methylprednisone acetate), A-METHAPRED™ and SOLUMEDROL™ (methylprednisolone sodium succinate), ELOCON™ (mometasone furoate), HALDRONE™ (paramethasone acetate), DELTA-CORTEF™ (prednisolone), ECONOPRED™ (prednisolone acetate), HYDELTRASOL™ (prednisolone sodium phosphate), HYDELTRA-T.B.A™ (prednisolone tebutate), DELTASONE™ (prednisone), ARISTOCORT™ and KENACORT™ (triamcinolone), KENALOG™ (triamcinolone acetonide), ARISTOCORT™ and KENACORT DIACETATE™ (triamcinolone diacetate), and ARISTOSPAN™ (triamcinolone hexacetonide); inhibitors of biosynthesis and action of adrenocortical steroids such as CYTADREN™ (aminoglutethimide), NIZORAL™ (ketoconazole), MODRASTANE™ (trilostane), and METOPIRONE™ (metyrapone); bovine, porcine or human insulin or mixtures thereof; insulin analogs; recombinant human insulin such as HUMULIN™ and NOVOLIN™; oral hypoglycemic agents such as ORAMIDE™ and ORINASE™ (tolbutamide), DIABINESE™ (chlorpropamide), TOLAMIDE™ and TOLINASE™ (tolazamide), DYMELOR™ (acetohexamide), glibenclamide, MICRONASE™, DIBETA™ and GLYNASE™ (glyburide), GLUCOTROL™ (glipizide), and DIAMICRON™ (gliclazide), GLUCOPHAGE™ (metformin), ciglitazone, pioglitazone, and alpha-glucosidase inhibitors; bovine or porcine glucagon; somatostatins such as SANDOSTATIN™ (octreotide); and diazoxides such as PROGLYCEM™ (diazoxide).

[1018] In one embodiment, the Therapeutics of the invention are administered in combination with treatments for uterine motility disorders. Treatments for uterine motility disorders include, but are not limited to, estrogen drugs such as conjugated estrogens (e.g., PREMARIN® and ESTRATAB®), estradiols (e.g., CLIMARA® and ALORA®), estropipate, and chlorotrianisene; progestin drugs (e.g., AMEN® (medroxyprogesterone), MICRONOR® (norethidrone acetate), PROMETRIUM® progesterone, and megestrol acetate); and estrogen/progesterone combination therapies such as, for example, conjugated estrogens/medroxyprogesterone (e.g., PREMPRO™ and PREMPHASE®) and norethindrone acetate/ethinyl estsradiol (e.g., FEMHRT™).

[1019] In an additional embodiment, the Therapeutics of the invention are administered in combination with drugs effective in treating iron deficiency and hypochromic anemias, including but not limited to, ferrous sulfate (iron sulfate, FEOSOL™), ferrous fumarate (e.g., FEOSTAT™), ferrous gluconate (e.g., FERGON™), polysaccharide-iron complex (e.g., NIFEREX™), iron dextran injection (e.g., INFED™), cupric sulfate, pyroxidine, riboflavin, Vitamin B₁₂, cyancobalamin injection (e.g., REDISOL™, RUBRAMIN PC™), hydroxocobalamin, folic acid (e.g., FOLVITE™), leucovorin (folinic acid, 5-CHOH4PteGlu, citrovorum factor) or WELLCOVORIN (Calcium salt of leucovorin), transferrin or ferritin.

[1020] In certain embodiments, the Therapeutics of the invention are administered in combination with agents used to treat psychiatric disorders. Psychiatric drugs that may be administered with the Therapeutics of the invention include, but are not limited to, antipsychotic agents (e.g., chlorpromazine, chlorprothixene, clozapine, fluphenazine, haloperidol, loxapine, mesoridazine, molindone, olanzapine, perphenazine, pimozide, quetiapine, risperidone, thioridazine, thiothixene, trifluoperazine, and triflupromazine), antimanic agents (e.g., carbamazepine, divalproex sodium, lithium carbonate, and lithium citrate), antidepressants (e.g., amitriptyline, amoxapine, bupropion, citalopram, clomipramine, desipramine, doxepin, fluvoxamine, fluoxetine, imipramine, isocarboxazid, maprotiline, mirtazapine, nefazodone, nortriptyline, paroxetine, phenelzine, protriptyline, sertraline, tranylcypromine, trazodone, trimipramine, and venlafaxine), antianxiety agents (e.g., alprazolam, buspirone, chlordiazepoxide, clorazepate, diazepam, halazepam, lorazepam, oxazepam, and prazepam), and stimulants (e.g., d-amphetamine, methylphenidate, and pemoline).

[1021] In other embodiments, the Therapeutics of the invention are administered in combination with agents used to treat neurological disorders. Neurological agents that may be administered with the Therapeutics of the invention include, but are not limited to, antiepileptic agents (e.g., carbamazepine, clonazepam, ethosuximide, phenobarbital, phenytoin, primidone, valproic acid, divalproex sodium, felbamate, gabapentin, lamotrigine, levetiracetam, oxcarbazepine, tiagabine, topiramate, zonisamide, diazepam, lorazepam, and clonazepam), antiparkinsonian agents (e.g., levodopa/carbidopa, selegiline, amantidine, bromocriptine, pergolide, ropinirole, pramipexole, benztropine; biperiden; ethopropazine; procyclidine; trihexyphenidyl, tolcapone), and ALS therapeutics (e.g. riluzole).

[1022] In another embodiment, Therapeutics of the invention are administered in combination with vasodilating agents and/or calcium channel blocking agents. Vasodilating agents that may be administered with the Therapeutics of the invention include, but are not limited to, Angiotensin Converting Enzyme (ACE) inhibitors (e.g., papaverine, isoxsuprine, benazepril, captopril, cilazapril, enalapril, enalaprilat, fosinopril, lisinopril, moexipril, perindopril, quinapril, ramipril, spirapril, trandolapril, and nylidrin), and nitrates (e.g., isosorbide dinitrate, isosorbide mononitrate, and nitroglycerin). Examples of calcium channel blocking agents that may be administered in combination with the Therapeutics of the invention include, but are not limited to amlodipine, bepridil, diltiazem, felodipine, flunarizine, isradipine, nicardipine, nifedipine, nimodipine, and verapamil.

[1023] In additional embodiments, the Therapeutics of the invention are administered in combination with other therapeutic or prophylactic regimens, such as, for example, radiation therapy.

### Example 14

### Method of Treating Decreased Levels of the Polypeptide

[1024] The present invention relates to a method for treating an individual in need of an increased level of a polypeptide of the invention in the body comprising administering to such an individual a composition comprising a therapeutically effective amount of an agonist of the invention (including polypeptides of the invention). Moreover, it will be appreciated that conditions caused by a decrease in the standard or normal expression level of a polypeptide of the present invention in an individual can be treated by administering the agonist or antagonist of the present invention. Thus, the invention also provides a method of treatment of an individual in need of an increased level of the polypeptide comprising administering to such an individual a Therapeutic comprising an amount of the agonist or antagonist to increase the activity level of the polypeptide in such an individual.

[1025] For example, a patient with decreased levels of a polypeptide receives a daily dose 0.1-100 ug/kg of the agonist or antagonist for six consecutive days. The exact details of the dosing scheme, based on administration and formulation, are provided in Example 13.

### Example 15

### Method of Treating Increased Levels of the Polypeptide

[1026] The present invention also relates to a method of treating an individual in need of a decreased level of a polypeptide of the invention in the body comprising administering to such an individual a composition comprising a therapeutically effective amount of an antagonist of the invention (including polypeptides and antibodies of the invention).

[1027] In one example, antisense technology is used to inhibit production of a polypeptide of the present invention. This technology is one example of a method of decreasing levels of a polypeptide, due to a variety of etiologies, such as cancer.

[1028] For example, a patient diagnosed with abnormally increased levels of a polypeptide is administered intravenously antisense polynucleotides at 0.5, 1.0, 1.5, 2.0 and 3.0 mg/kg day for 21 days. This treatment is repeated after a 7-day rest period if the treatment was well tolerated. The antisense polynucleotides of the present invention can be formulated using techniques and formulations described herein (e.g. see Example 13), or otherwise known in the art.

### Example 16

### Method of Treatment Using Gene Therapy-Ex Vivo

[1029] One method of gene therapy transplants fibroblasts, which are capable of expressing a polypeptide, onto a patient. Generally, fibroblasts are obtained from a subject by skin biopsy. The resulting tissue is placed in tissue-culture medium and separated into small pieces. Small chunks of the tissue are placed on a wet surface of a tissue culture flask, approximately ten pieces are placed in each flask. The flask is turned upside down, closed tight and left at room temperature over night. After 24 hours at room temperature, the flask is inverted and the chunks of tissue remain fixed to the bottom of the flask and fresh media (e.g., Ham's F12 media, with 10% FBS, penicillin and streptomycin) is added. The flasks are then incubated at 37 degree C for approximately one week.

[1030] At this time, fresh media is added and subsequently changed every several days. After an additional two weeks in culture, a monolayer of fibroblasts emerge. The monolayer is trypsinized and scaled into larger flasks.

[1031] pMV-7 (Kirschmeier, P. T. et al., DNA, 7:219-25 (1988)), flanked by the long terminal repeats of the Moloney murine sarcoma virus, is digested with EcoRI and HindIII and subsequently treated with calf intestinal phosphatase. The linear vector is fractionated on agarose gel and purified, using glass beads.

[1032] The cDNA encoding a polypeptide of the present invention can be amplified using PCR primers which correspond to the 5′ and 3′ end sequences respectively as set forth in Example 1 using primers and having appropriate restriction sites and initiation/stop codons, if necessary. Preferably, the 5′ primer contains an EcoRI site and the 3′ primer includes a HindIII site. Equal quantities of the Moloney murine sarcoma virus linear backbone and the amplified EcoRI and HindIII fragment are added together, in the presence of T4 DNA ligase. The resulting mixture is maintained under conditions appropriate for ligation of the two fragments. The ligation mixture is then used to transform bacteria HB101, which are then plated onto agar containing kanamycin for the purpose of confirming that the vector has the gene of interest properly inserted.

[1033] The amphotropic pA317 or GP+am12 packaging cells are grown in tissue culture to confluent density in Dulbecco's Modified Eagles Medium (DMEM) with 10% calf serum (CS), penicillin and streptomycin. The MSV vector containing the gene is then added to the media and the packaging cells transduced with the vector. The packaging cells now produce infectious viral particles containing the gene (the packaging cells are now referred to as producer cells).

[1034] Fresh media is added to the transduced producer cells, and subsequently, the media is harvested from a 10 cm plate of confluent producer cells. The spent media, containing the infectious viral particles, is filtered through a millipore filter to remove detached producer cells and this media is then used to infect fibroblast cells. Media is removed from a sub-confluent plate of fibroblasts and quickly replaced with the media from the producer cells. This media is removed and replaced with fresh media. If the titer of virus is high, then virtually all fibroblasts will be infected and no selection is required. If the titer is very low, then it is necessary to use a retroviral vector that has a selectable marker, such as neo or his. Once the fibroblasts have been efficiently infected, the fibroblasts are analyzed to determine whether protein is produced.

[1035] The engineered fibroblasts are then transplanted onto the host, either alone or after having been grown to confluence on cytodex 3 microcarrier beads.

### Example 17

### Gene Therapy Using Endogenous Genes Corresponding to Polynucleotides of the Invention

[1036] Another method of gene therapy according to the present invention involves operably associating the endogenous polynucleotide sequence of the invention with a promoter via homologous recombination as described, for example, in U.S. Pat. No. 5,641,670, issued Jun. 24, 1997; International Publication NO: WO 96/29411, published Sep. 26, 1996; International Publication NO: WO 94/12650, published Aug. 4, 1994; Koller et al., Proc. Natl. Acad. Sci. USA, 86:8932-8935 (1989); and Zijlstra et al., Nature, 342:435-438 (1989). This method involves the activation of a gene which is present in the target cells, but which is not expressed in the cells, or is expressed at a lower level than desired.

[1037] Polynucleotide constructs are made which contain a promoter and targeting sequences, which are homologous to the 5′ non-coding sequence of endogenous polynucleotide sequence, flanking the promoter. The targeting sequence will be sufficiently near the 5′ end of the polynucleotide sequence so the promoter will be operably linked to the endogenous sequence upon homologous recombination. The promoter and the targeting sequences can be amplified using PCR. Preferably, the amplified promoter contains distinct restriction enzyme sites on the 5′ and 3′ ends. Preferably, the 3′ end of the first targeting sequence contains the same restriction enzyme site as the 5′ end of the amplified promoter and the 5′ end of the second targeting sequence contains the same restriction site as the 3′ end of the amplified promoter.

[1038] The amplified promoter and the amplified targeting sequences are digested with the appropriate restriction enzymes and subsequently treated with calf intestinal phosphatase. The digested promoter and digested targeting sequences are added together in the presence of T4 DNA ligase. The resulting mixture is maintained under conditions appropriate for ligation of the two fragments. The construct is size fractionated on an agarose gel, then purified by phenol extraction and ethanol precipitation.

[1039] In this Example, the polynucleotide constructs are administered as naked polynucleotides via electroporation. However, the polynucleotide constructs may also be administered with transfection-facilitating agents, such as liposomes, viral sequences, viral particles, precipitating agents, etc. Such methods of delivery are known in the art.

[1040] Once the cells are transfected, homologous recombination will take place which results in the promoter being operably linked to the endogenous polynucleotide sequence. This results in the expression of polynucleotide corresponding to the polynucleotide in the cell. Expression may be detected by immunological staining, or any other method known in the art.

[1041] Fibroblasts are obtained from a subject by skin biopsy. The resulting tissue is placed in DMEM+10% fetal calf serum. Exponentially growing or early stationary phase fibroblasts are trypsinized and rinsed from the plastic surface with nutrient medium. An aliquot of the cell suspension is removed for counting, and the remaining cells are subjected to centrifugation. The supernatant is aspirated and the pellet is resuspended in 5 ml of electroporation buffer (20 mM HEPES pH 7.3, 137 mM NaCl, 5 mM KCl, 0.7 mM Na₂ HPO₄, 6 mM dextrose). The cells are recentrifuged, the supernatant aspirated, and the cells resuspended in electroporation buffer containing 1 mg/ml acetylated bovine serum albumin. The final cell suspension contains approximately 3X1 06 cells/ml. Electroporation should be performed immediately following resuspension.

[1042] Plasmid DNA is prepared according to standard techniques. For example, to construct a plasmid for targeting to the locus corresponding to the polynucleotide of the invention, plasmid pUC18 (MBI Fermentas, Amherst, N.Y.) is digested with HindIII. The CMV promoter is amplified by PCR with an XbaI site on the 5′ end and a BamHI site on the 3′ end. Two non-coding sequences are amplified via PCR: one non-coding sequence (fragment 1) is amplified with a HindIII site at the 5′ end and an Xba site at the 3′end; the other non-coding sequence (fragment 2) is amplified with a BamHI site at the 5′end and a HindIII site at the 3′end. The CMV promoter and the fragments (1 and 2) are digested with the appropriate enzymes (CMV promoter—Xbal and BamHI; fragment 1—XbaI; fragment 2—BamHI) and ligated together. The resulting ligation product is digested with HindIII, and ligated with the HindIII-digested pUC 18 plasmid.

[1043] Plasmid DNA is added to a sterile cuvette with a 0.4 cm electrode gap (Bio-Rad). The final DNA concentration is generally at least 120 μg/ml. 0.5 ml of the cell suspension (containing approximately 1.5.×10⁶ cells) is then added to the cuvette, and the cell suspension and DNA solutions are gently mixed. Electroporation is performed with a Gene-Pulser apparatus (Bio-Rad). Capacitance and voltage are set at 960 μF and 250-300 V, respectively. As voltage increases, cell survival decreases, but the percentage of surviving cells that stably incorporate the introduced DNA into their genome increases dramatically. Given these parameters, a pulse time of approximately 14-20 mSec should be observed.

[1044] Electroporated cells are maintained at room temperature for approximately 5 min, and the contents of the cuvette are then gently removed with a sterile transfer pipette. The cells are added directly to 10 ml of prewarmed nutrient media (DMEM with 15% calf serum) in a 10 cm dish and incubated at 37 degree C. The following day, the media is aspirated and replaced with 10 ml of fresh media and incubated for a further 16-24 hours.

[1045] The engineered fibroblasts are then injected into the host, either alone or after having been grown to confluence on cytodex 3 microcarrier beads. The fibroblasts now produce the protein product. The fibroblasts can then be introduced into a patient as described above.

### Example 18

### Method of Treatment Using Gene Therapy—In Vivo

[1046] Another aspect of the present invention is using in vivo gene therapy methods to treat disorders, diseases and conditions. The gene therapy method relates to the introduction of naked nucleic acid (DNA, RNA, and antisense DNA or RNA) sequences into an animal to increase or decrease the expression of the polypeptide. The polynucleotide of the present invention may be operatively linked to (i.e., associated with) a promoter or any other genetic elements necessary for the expression of the polypeptide by the target tissue. Such gene therapy and delivery techniques and methods are known in the art, see, for example, WO90/11092, WO98/11779; U.S. Pat. Nos. 5693622, 5705151, 5580859; Tabata et al., Cardiovasc. Res. 35(3):470-479 (1997); Chao et al., Pharmacol. Res. 35(6):517-522 (1997); Wolff, Neuromuscul. Disord. 7(5):314-318 (1997); Schwartz et al., Gene Ther. 3(5):405-411 (1996); Tsurumi et al., Circulation 94(12):3281-3290 (1996) (incorporated herein by reference).

[1047] The polynucleotide constructs may be delivered by any method that delivers injectable materials to the cells of an animal, such as, injection into the interstitial space of tissues (heart, muscle, skin, lung, liver, intestine and the like). The polynucleotide constructs can be delivered in a pharmaceutically acceptable liquid or aqueous carrier.

[1048] The term “naked” polynucleotide, DNA or RNA, refers to sequences that are free from any delivery vehicle that acts to assist, promote, or facilitate entry into the cell, including viral sequences, viral particles, liposome formulations, lipofectin or precipitating agents and the like. However, the polynucleotides of the present invention may also be delivered in liposome formulations (such as those taught in Felgner P. L. et al. (1995) Ann. NY Acad. Sci. 772:126-139 and Abdallah B. et al. (1995) Biol. Cell 85(1):1-7) which can be prepared by methods well known to those skilled in the art.

[1049] The polynucleotide vector constructs used in the gene therapy method are preferably constructs that will not integrate into the host genome nor will they contain sequences that allow for replication. Any strong promoter known to those skilled in the art can be used for driving the expression of DNA. Unlike other gene therapy techniques, one major advantage of introducing naked nucleic acid sequences into target cells is the transitory nature of the polynucleotide synthesis in the cells. Studies have shown that non-replicating DNA sequences can be introduced into cells to provide production of the desired polypeptide for periods of up to six months.

[1050] The polynucleotide construct can be delivered to the interstitial space of tissues within an animal, including muscle, skin, brain, lung, liver, spleen, bone marrow, thymus, heart, lymph, blood, bone, cartilage, pancreas, kidney, gall bladder, stomach, intestine, testis, ovary, uterus, rectum, nervous system, eye, gland, and connective tissue. Interstitial space of the tissues comprises the intercellular fluid, mucopolysaccharide matrix among the reticular fibers of organ tissues, elastic fibers in the walls of vessels or chambers, collagen fibers of fibrous tissues, or that same matrix within connective tissue ensheathing muscle cells or in the lacunae of bone. It is similarly the space occupied by the plasma of the circulation and the lymph fluid of the lymphatic channels. Delivery to the interstitial space of muscle tissue is preferred for the reasons discussed below. They may be conveniently delivered by injection into the tissues comprising these cells. They are preferably delivered to and expressed in persistent, non-dividing cells which are differentiated, although delivery and expression may be achieved in non-differentiated or less completely differentiated cells, such as, for example, stem cells of blood or skin fibroblasts. In vivo muscle cells are particularly competent in their ability to take up and express polynucleotides.

[1051] For the naked polynucleotide injection, an effective dosage amount of DNA or RNA will be in the range of from about 0.05 g/kg body weight to about 50 mg/kg body weight. Preferably the dosage will be from about 0.005 mg/kg to about 20 mg/kg and more preferably from about 0.05 mg/kg to about 5 mg/kg. Of course, as the artisan of ordinary skill will appreciate, this dosage will vary according to the tissue site of injection. The appropriate and effective dosage of nucleic acid sequence can readily be determined by those of ordinary skill in the art and may depend on the condition being treated and the route of administration. The preferred route of administration is by the parenteral route of injection into the interstitial space of tissues. However, other parenteral routes may also be used, such as, inhalation of an aerosol formulation particularly for delivery to lungs or bronchial tissues, throat or mucous membranes of the nose. In addition, naked polynucleotide constructs can be delivered to arteries during angioplasty by the catheter used in the procedure.

[1052] The dose response effects of injected polynucleotide in muscle in vivo is determined as follows. Suitable template DNA for production of mRNA coding for polypeptide of the present invention is prepared in accordance with a standard recombinant DNA methodology. The template DNA, which may be either circular or linear, is either used as naked DNA or complexed with liposomes. The quadriceps muscles of mice are then injected with various amounts of the template DNA.

[1053] Five to six week old female and male Balb/C mice are anesthetized by intraperitoneal injection with 0.3 ml of 2.5% Avertin. A 1.5 cm incision is made on the anterior thigh, and the quadriceps muscle is directly visualized. The template DNA is injected in 0.1 ml of carrier in a 1 cc syringe through a 27 gauge needle over one minute, approximately 0.5 cm from the distal insertion site of the muscle into the knee and about 0.2 cm deep. A suture is placed over the injection site for future localization, and the skin is closed with stainless steel clips.

[1054] After an appropriate incubation time (e.g., 7 days) muscle extracts are prepared by excising the entire quadriceps. Every fifth 15 um cross-section of the individual quadriceps muscles is histochemically stained for protein expression. A time course for protein expression may be done in a similar fashion except that quadriceps from different mice are harvested at different times. Persistence of DNA in muscle following injection may be determined by Southern blot analysis after preparing total cellular DNA and HIRT supernatants from injected and control mice. The results of the above experimentation in mice can be used to extrapolate proper dosages and other treatment parameters in humans and other animals using naked DNA.

### Example 19

### Transgenic Animals

[1055] The polypeptides of the invention can also be expressed in transgenic animals. Animals of any species, including, but not limited to, mice, rats, rabbits, hamsters, guinea pigs, pigs, micro-pigs, goats, sheep, cows and non-human primates, e.g., baboons, monkeys, and chimpanzees may be used to generate transgenic animals. In a specific embodiment, techniques described herein or otherwise known in the art, are used to express polypeptides of the invention in humans, as part of a gene therapy protocol.

[1056] Any technique known in the art may be used to introduce the transgene (i.e., polynucleotides of the invention) into animals to produce the founder lines of transgenic animals. Such techniques include, but are not limited to, pronuclear microinjection (Paterson et al., Appl. Microbiol. Biotechnol. 40:691-698 (1994); Carver et al., Biotechnology (NY) 11:1263-1270 (1993); Wright et al., Biotechnology (NY) 9:830-834 (1991); and Hoppe et al., U.S. Pat. No. 4,873,191 (1989)); retrovirus mediated gene transfer into germ lines (Van der Putten et al., Proc. Natl. Acad. Sci., USA 82:6148-6152 (1985)), blastocysts or embryos; gene targeting in embryonic stem cells (Thompson et al., Cell 56:313-321 (1989)); electroporation of cells or embryos (Lo, 1983, Mol Cell. Biol. 3:1803-1814 (1983)); introduction of the polynucleotides of the invention using a gene gun (see, e.g., Ulmer et al., Science 259:1745 (1993); introducing nucleic acid constructs into embryonic pleuripotent stem cells and transferring the stem cells back into the blastocyst; and sperm-mediated gene transfer (Lavitrano et al., Cell 57:717-723 (1989); etc. For a review of such techniques, see Gordon, “Transgenic Animals,” Intl. Rev. Cytol. 115:171-229 (1989), which is incorporated by reference herein in its entirety.

[1057] Any technique known in the art may be used to produce transgenic clones containing polynucleotides of the invention, for example, nuclear transfer into enucleated oocytes of nuclei from cultured embryonic, fetal, or adult cells induced to quiescence (Campell et al., Nature 380:64-66 (1996); Wilmut et al., Nature 385:810-813 (1997)).

[1058] The present invention provides for transgenic animals that carry the transgene in all their cells, as well as animals which carry the transgene in some, but not all their cells, i.e., mosaic animals or chimeric. The transgene may be integrated as a single transgene or as multiple copies such as in concatamers, e.g., head-to-head tandems or head-to-tail tandems. The transgene may also be selectively introduced into and activated in a particular cell type by following, for example, the teaching of Lasko et al. (Lasko et al., Proc. Natl. Acad. Sci. USA 89:6232-6236 (1992)). The regulatory sequences required for such a cell-type specific activation will depend upon the particular cell type of interest, and will be apparent to those of skill in the art. When it is desired that the polynucleotide transgene be integrated into the chromosomal site of the endogenous gene, gene targeting is preferred. Briefly, when such a technique is to be utilized, vectors containing some nucleotide sequences homologous to the endogenous gene are designed for the purpose of integrating, via homologous recombination with chromosomal sequences, into and disrupting the function of the nucleotide sequence of the endogenous gene. The transgene may also be selectively introduced into a particular cell type, thus inactivating the endogenous gene in only that cell type, by following, for example, the teaching of Gu et al. (Gu et al., Science 265:103-106 (1994)). The regulatory sequences required for such a cell-type specific inactivation will depend upon the particular cell type of interest, and will be apparent to those of skill in the art.

[1059] Once transgenic animals have been generated, the expression of the recombinant gene may be assayed utilizing standard techniques. Initial screening may be accomplished by Southern blot analysis or PCR techniques to analyze animal tissues to verify that integration of the transgene has taken place. The level of mRNA expression of the transgene in the tissues of the transgenic animals may also be assessed using techniques which include, but are not limited to, Northern blot analysis of tissue samples obtained from the animal, in situ hybridization analysis, and reverse transcriptase-PCR (rt-PCR). Samples of transgenic gene-expressing tissue may also be evaluated immunocytochemically or immunohistochemically using antibodies specific for the transgene product.

[1060] Once the founder animals are produced, they may be bred, inbred, outbred, or crossbred to produce colonies of the particular animal. Examples of such breeding strategies include, but are not limited to: outbreeding of founder animals with more than one integration site in order to establish separate lines; inbreeding of separate lines in order to produce compound transgenics that express the transgene at higher levels because of the effects of additive expression of each transgene; crossing of heterozygous transgenic animals to produce animals homozygous for a given integration site in order to both augment expression and eliminate the need for screening of animals by DNA analysis; crossing of separate homozygous lines to produce compound heterozygous or homozygous lines; and breeding to place the transgene on a distinct background that is appropriate for an experimental model of interest.

[1061] Transgenic animals of the invention have uses which include, but are not limited to, animal model systems useful in elaborating the biological function of polypeptides of the present invention, studying conditions and/or disorders associated with aberrant expression, and in screening for compounds effective in ameliorating such conditions and/or disorders.

### Example 20

### Knock-out Animals

[1062] Endogenous gene expression can also be reduced by inactivating or “knocking out” the gene and/or its promoter using targeted homologous recombination. (e.g., see Smithies et al., Nature 317:230-234 (1985); Thomas & Capecchi, Cell 51:503-512 (1987); Thompson et al., Cell 5:313-321 (1989); each of which is incorporated by reference herein in its entirety). For example, a mutant, non-functional polynucleotide of the invention (or a completely unrelated DNA sequence) flanked by DNA homologous to the endogenous polynucleotide sequence (either the coding regions or regulatory regions of the gene) can be used, with or without a selectable marker and/or a negative selectable marker, to transfect cells that express polypeptides of the invention in vivo. In another embodiment, techniques known in the art are used to generate knockouts in cells that contain, but do not express the gene of interest. Insertion of the DNA construct, via targeted homologous recombination, results in inactivation of the targeted gene. Such approaches are particularly suited in research and agricultural fields where modifications to embryonic stem cells can be used to generate animal offspring with an inactive targeted gene (e.g., see Thomas & Capecchi 1987 and Thompson 1989, supra). However this approach can be routinely adapted for use in humans provided the recombinant DNA constructs are directly administered or targeted to the required site in vivo using appropriate viral vectors that will be apparent to those of skill in the art.

[1063] In further embodiments of the invention, cells that are genetically engineered to express the polypeptides of the invention, or alternatively, that are genetically engineered not to express the polypeptides of the invention (e.g., knockouts) are administered to a patient in vivo. Such cells may be obtained from the patient (i.e., animal, including human) or an MHC compatible donor and can include, but are not limited to fibroblasts, bone marrow cells, blood cells (e.g., lymphocytes), adipocytes, muscle cells, endothelial cells etc. The cells are genetically engineered in vitro using recombinant DNA techniques to introduce the coding sequence of polypeptides of the invention into the cells, or alternatively, to disrupt the coding sequence and/or endogenous regulatory sequence associated with the polypeptides of the invention, e.g., by transduction (using viral vectors, and preferably vectors that integrate the transgene into the cell genome) or transfection procedures, including, but not limited to, the use of plasmids, cosmids, YACs, naked DNA, electroporation, liposomes, etc. The coding sequence of the polypeptides of the invention can be placed under the control of a strong constitutive or inducible promoter or promoter/enhancer to achieve expression, and preferably secretion, of the polypeptides of the invention. The engineered cells which express and preferably secrete the polypeptides of the invention can be introduced into the patient systemically, e.g., in the circulation, or intraperitoneally.

[1064] Alternatively, the cells can be incorporated into a matrix and implanted in the body, e.g., genetically engineered fibroblasts can be implanted as part of a skin graft; genetically engineered endothelial cells can be implanted as part of a lymphatic or vascular graft. (See, for example, Anderson et al. U.S. Pat. No. 5,399,349; and Mulligan & Wilson, U.S. Pat. No. 5,460,959 each of which is incorporated by reference herein in its entirety).

[1065] When the cells to be administered are non-autologous or non-MHC compatible cells, they can be administered using well known techniques which prevent the development of a host immune response against the introduced cells. For example, the cells may be introduced in an encapsulated form which, while allowing for an exchange of components with the immediate extracellular environment, does not allow the introduced cells to be recognized by the host immune system.

[1066] Transgenic and “knock-out” animals of the invention have uses which include, but are not limited to, animal model systems useful in elaborating the biological function of polypeptides of the present invention, studying conditions and/or disorders associated with aberrant expression, and in screening for compounds effective in ameliorating such conditions and/or disorders.

### Example 21

### Assays Detecting Stimulation or Inhibition of B cell Proliferation and Differentiation

[1067] Generation of functional humoral immune responses requires both soluble and cognate signaling between B-lineage cells and their microenvironment. Signals may impart a positive stimulus that allows a B-lineage cell to continue its programmed development, or a negative stimulus that instructs the cell to arrest its current developmental pathway. To date, numerous stimulatory and inhibitory signals have been found to influence B cell responsiveness including IL-2, IL-4, IL-5, IL-6, IL-7, IL10, IL-13, IL-14 and IL-15. Interestingly, these signals are by themselves weak effectors but can, in combination with various co-stimulatory proteins, induce activation, proliferation, differentiation, homing, tolerance and death among B cell populations.

[1068] One of the best studied classes of B-cell co-stimulatory proteins is the TNF-superfamily. Within this family CD40, CD27, and CD30 along with their respective ligands CD154, CD70, and CD153 have been found to regulate a variety of immune responses. Assays which allow for the detection and/or observation of the proliferation and differentiation of these B-cell populations and their precursors are valuable tools in determining the effects various proteins may have on these B-cell populations in terms of proliferation and differentiation. Listed below are two assays designed to allow for the detection of the differentiation, proliferation, or inhibition of B-cell populations and their precursors.

[1069] In Vitro Assay—Agonists or antagonists of the invention can be assessed for its ability to induce activation, proliferation, differentiation or inhibition and/or death in B-cell populations and their precursors. The activity of the agonists or antagonists of the invention on purified human tonsillar B cells, measured qualitatively over the dose range from 0.1 to 10,000 ng/mL, is assessed in a standard B-lymphocyte co-stimulation assay in which purified tonsillar B cells are cultured in the presence of either formalin-fixed Staphylococcus aureus Cowan I (SAC) or immobilized anti-human IgM antibody as the priming agent. Second signals such as IL-2 and IL-15 synergize with SAC and IgM crosslinking to elicit B cell proliferation as measured by tritiated-thymidine incorporation. Novel synergizing agents can be readily identified using this assay. The assay involves isolating human tonsillar B cells by magnetic bead (MACS) depletion of CD3-positive cells. The resulting cell population is greater than 95% B cells as assessed by expression of CD45R(B220).

[1070] Various dilutions of each sample are placed into individual wells of a 96-well plate to which are added 10⁵ B-cells suspended in culture medium (RPMI 1640 containing 10% FBS, 5×10⁻⁵M 2ME, 100 U/ml penicillin, 10 ug/ml streptomycin, and 10⁻⁵ dilution of SAC) in a total volume of 150 ul. Proliferation or inhibition is quantitated by a 20 h pulse (1 uCi/well) with 3H-thymidine (6.7 Ci/niM) beginning 72 h post factor addition. The positive and negative controls are IL2 and medium respectively.

[1071] In vivo Assay—BALB/c mice are injected (i.p.) twice per day with buffer only, or 2 mg/Kg of agonists or antagonists of the invention, or truncated forms thereof. Mice receive this treatment for 4 consecutive days, at which time they are sacrificed and various tissues and serum collected for analyses. Comparison of H&E sections from normal spleens and spleens treated with agonists or antagonists of the invention identify the results of the activity of the agonists or antagonists on spleen cells, such as the diffusion of peri-arterial lymphatic sheaths, and/or significant increases in the nucleated cellularity of the red pulp regions, which may indicate the activation of the differentiation and proliferation of B-cell populations. Immunohistochemical studies using a B cell marker, anti-CD45R(B220), are used to determine whether any physiological changes to splenic cells, such as splenic disorganization, are due to increased B-cell representation within loosely defined B-cell zones that infiltrate established T-cell regions.

[1072] Flow cytometric analyses of the spleens from mice treated with agonist or antagonist is used to indicate whether the agonists or antagonists specifically increases the proportion of ThB+, CD45R(B220)dull B cells over that which is observed in control mice.

[1073] Likewise, a predicted consequence of increased mature B-cell representation in vivo is a relative increase in serum Ig titers. Accordingly, serum IgM and IgA levels are compared between buffer and agonists or antagonists-treated mice.

[1074] The studies described in this example tested activity of agonists or antagonists of the invention. However, one skilled in the art could easily modify the exemplified studies to test the activity of polynucleotides or polypeptides of the invention (e.g., gene therapy).

### Example 22

### T Cell Proliferation Assay

[1075] A CD3-induced proliferation assay is performed on PBMCs and is measured by the uptake of ³H-thymidine. The assay is performed as follows. Ninety-six well plates are coated with 100 μl/well of mAb to CD3 (HIT3a, Pharmingen) or isotype-matched control mAb (B33.1) overnight at 4 degrees C (1 μg/ml in 0.05M bicarbonate buffer, pH 9.5), then washed three times with PBS. PBMC are isolated by F/H gradient centrifugation from human peripheral blood and added to quadruplicate wells (5×10⁴/well) of mAb coated plates in RPMI containing 10% FCS and P/S in the presence of varying concentrations of agonists or antagonists of the invention (total volume 200 ul). Relevant protein buffer and medium alone are controls. After 48 hr. culture at 37 degrees C, plates are spun for 2 min. at 1000 rpm and 100 μl of supernatant is removed and stored -20 degrees C for measurement of IL-2 (or other cytokines) if effect on proliferation is observed. Wells are supplemented with 100 ul of medium containing 0.5 uCi of ³H-thymidine and cultured at 37 degrees C for 18-24 hr. Wells are harvested and incorporation of ³H-thymidine used as a measure of proliferation. Anti-CD3 alone is the positive control for proliferation. IL-2 (100 U/ml) is also used as a control which enhances proliferation. Control antibody which does not induce proliferation of T cells is used as the negative control for the effects of agonists or antagonists of the invention.

[1076] The studies described in this example tested activity of agonists or antagonists of the invention. However, one skilled in the art could easily modify the exemplified studies to test the activity of polynucleotides or polypeptides of the invention (e.g., gene therapy).

### Example 23

### Effect of Agonists or Antagonists of the Invention on the Expression of MHC Class II, Costimulatory and Adhesion Molecules and Cell Differentiation of Monocytes and Monocyte-derived Human Dendritic Cells

[1077] Dendritic cells are generated by the expansion of proliferating precursors found in the peripheral blood: adherent PBMC or elutriated monocytic fractions are cultured for 7-10 days with GM-CSF (50 ng/ml) and IL-4 (20 ng/ml). These dendritic cells have the characteristic phenotype of immature cells (expression of CD1, CDSO, CD86, CD40 and MHC class II antigens). Treatment with activating factors, such as TNF-α, causes a rapid change in surface phenotype (increased expression of MHC class I and II, costimulatory and adhesion molecules, downregulation of FCγRII, upregulation of CD83). These changes correlate with increased antigen-presenting capacity and with functional maturation of the dendritic cells.

[1078] FACS analysis of surface antigens is performed as follows. Cells are treated 1-3 days with increasing concentrations of agonist or antagonist of the invention or LPS (positive control), washed with PBS containing 1% BSA and 0.02 mM sodium azide, and then incubated with 1:20 dilution of appropriate FITC- or PE-labeled monoclonal antibodies for 30 minutes at 4 degrees C. After an additional wash, the labeled cells are analyzed by flow cytometry on a FACScan (Becton Dickinson).

[1079] Effect on the Production of Cytokines.

[1080] Cytokines generated by dendritic cells, in particular IL-12, are important in the initiation of T-cell dependent immune responses. IL-12 strongly influences the development of Thl helper T-cell immune response, and induces cytotoxic T and NK cell function. An ELISA is used to measure the IL-12 release as follows. Dendritic cells (10⁶/ml) are treated with increasing concentrations of agonists or antagonists of the invention for 24 hours. LPS (100 ng/ml) is added to the cell culture as positive control. Supernatants from the cell cultures are then collected and analyzed for IL-12 content using commercial ELISA kit (e.g., R & D Systems (Minneapolis, Minn.)). The standard protocols provided with the kits are used.

[1081] Effect on the Expression of MHC Class II, Costimulatory and Adhesion Molecules.

[1082] Three major families of cell surface antigens can be identified on monocytes: adhesion molecules, molecules involved in antigen presentation, and Fe receptor. Modulation of the expression of MHC class II antigens and other costimulatory molecules, such as B7 and ICAM-1, may result in changes in the antigen presenting capacity of monocytes and ability to induce T cell activation. Increased expression of Fe receptors may correlate with improved monocyte cytotoxic activity, cytokine release and phagocytosis.

[1083] FACS analysis is used to examine the surface antigens as follows. Monocytes are treated 1-5 days with increasing concentrations of agonists or antagonists of the invention or LPS (positive control), washed with PBS containing 1% BSA and 0.02 mM sodium azide, and then incubated with 1:20 dilution of appropriate FITC- or PE-labeled monoclonal antibodies for 30 minutes at 4 degrees C. After an additional wash, the labeled cells are analyzed by flow cytometry on a FACScan (Becton Dickinson).

[1084] Monocyte Activation and/or Increased Survival.

[1085] Assays for molecules that activate (or alternatively, inactivate) monocytes and/or increase monocyte survival (or alternatively, decrease monocyte survival) are known in the art and may routinely be applied to determine whether a molecule of the invention finctions as an inhibitor or activator of monocytes. Agonists or antagonists of the invention can be screened using the three assays described below. For each of these assays, Peripheral blood mononuclear cells (PBMC) are purified from single donor leukopacks (American Red Cross, Baltimore, MD) by centrifugation through a Histopaque gradient (Sigma). Monocytes are isolated from PBMC by counterflow centrifugal elutriation.

[1086] Monocyte Survival Assay.

[1087] Human peripheral blood monocytes progressively lose viability when cultured in absence of serum or other stimuli. Their death results from internally regulated processes (apoptosis). Addition to the culture of activating factors, such as TNF-alpha dramatically improves cell survival and prevents DNA fragmentation. Propidium iodide (PI) staining is used to measure apoptosis as follows. Monocytes are cultured for 48 hours in polypropylene tubes in serum-free medium (positive control), in the presence of 100 ng/ml TNF-alpha (negative control), and in the presence of varying concentrations of the compound to be tested. Cells are suspended at a concentration of 2×10⁶/ml in PBS containing PI at a final concentration of 5 μg/ml, and then incubated at room temperature for 5 minutes before FACScan analysis. PI uptake has been demonstrated to correlate with DNA fragmentation in this experimental paradigm.

[1088] Effect on Cytokine Release.

[1089] An important function of monocytes/macrophages is their regulatory activity on other cellular populations of the immune system through the release of cytokines after stimulation. An ELISA to measure cytokine release is performed as follows. Human monocytes are incubated at a density of 5×10⁵ cells/ml with increasing concentrations of agonists or antagonists of the invention and under the same conditions, but in the absence of agonists or antagonists. For IL-12 production, the cells are primed overnight with IFN (100 U/ml) in the presence of agonist or antagonist of the invention. LPS (10 ng/ml) is then added. Conditioned media are collected after 24 h and kept frozen until use. Measurement of TNF-alpha, IL-10, MCP-1 and IL-8 is then performed using a commercially available ELISA kit (e.g., R & D Systems (Minneapolis, Minn.)) and applying the standard protocols provided with the kit.

[1090] Oxidative Burst.

[1091] Purified monocytes are plated in 96-w plate at 2-1×10⁵ cell/well. Increasing concentrations of agonists or antagonists of the invention are added to the wells in a total volume of 0.2 ml culture medium (RPMI 1640+10% FCS, glutamine and antibiotics). After 3 days incubation, the plates are centrifuged and the medium is removed from the wells. To the macrophage monolayers, 0.2 ml per well of phenol red solution (140 mM NaCl, 10 mM potassium phosphate buffer pH 7.0, 5.5 mM dextrose, 0.56 mM phenol red and 19 U/ml of HRPO) is added, together with the stimulant (200 nM PMA). The plates are incubated at 37° C. for 2 hours and the reaction is stopped by adding 20 μl IN NaOH per well. The absorbance is read at 610 nm. To calculate the amount of H₂O₂ produced by the macrophages, a standard curve of a H₂O₂ solution of known molarity is performed for each experiment.

[1092] The studies described in this example tested activity of agonists or antagonists of the invention. However, one skilled in the art could easily modify the exemplified studies to test the activity of polynucleotides or polypeptides of the invention (e.g., gene therapy).

### Example 24

### Biological Effects of Agonists or Antagonists of the Invention

[1093] Astrocyte and Neuronal Assays

[1094] Agonists or antagonists of the invention, expressed in Escherichia coli and purified as described above, can be tested for activity in promoting the survival, neurite outgrowth, or phenotypic differentiation of cortical neuronal cells and for inducing the proliferation of glial fibrillary acidic protein immunopositive cells, astrocytes. The selection of cortical cells for the bioassay is based on the prevalent expression of FGF-1 and FGF-2 in cortical structures and on the previously reported enhancement of cortical neuronal survival resulting from FGF-2 treatment. A thyrnidine incorporation assay, for example, can be used to elucidate an agonist or antagonist of the invention's activity on these cells.

[1095] Moreover, previous reports describing the biological effects of FGF-2 (basic FGF) on cortical or hippocampal neurons in vitro have demonstrated increases in both neuron survival and neurite outgrowth (Walicke et al., “Fibroblast growth factor promotes survival of dissociated hippocampal neurons and enhances neurite extension.” Proc. Natl. Acad. Sci. USA 83:3012-3016. (1986), assay herein incorporated by reference in its entirety). However, reports from experiments done on PC-12 cells suggest that these two responses are not necessarily synonymous and may depend on not only which FGF is being tested but also on which receptor(s) are expressed on the target cells. Using the primary cortical neuronal culture paradigm, the ability of an agonist or antagonist of the invention to induce neurite outgrowth can be compared to the response achieved with FGF-2 using, for example, a thymidine incorporation assay.

[1096] Fibroblast and Endothelial Cell Assays

[1097] Human lung fibroblasts are obtained from Clonetics (San Diego, Calif.) and maintained in growth media from Clonetics. Dermal microvascular endothelial cells are obtained from Cell Applications (San Diego, Calif.). For proliferation assays, the human lung fibroblasts and dermal microvascular endothelial cells can be cultured at 5,000 cells/well in a 96-well plate for one day in growth medium. The cells are then incubated for one day in 0.1% BSA basal medium. After replacing the medium with fresh 0.1% BSA medium, the cells are incubated with the test proteins for 3 days. Alamar Blue (Alamar Biosciences, Sacramento, Calif.) is added to each well to a final concentration of 10%. The cells are incubated for 4 hr. Cell viability is measured by reading in a CytoFluor fluorescence reader. For the PGE₂ assays, the human lung fibroblasts are cultured at 5,000 cells/well in a 96-well plate for one day. After a medium change to 0.1% BSA basal medium, the cells are incubated with FGF-2 or agonists or antagonists of the invention with or without IL-1α for 24 hours. The supernatants are collected and assayed for PGE₂ by EIA kit (Cayman, Ann Arbor, Mich.). For the IL-6 assays, the human lung fibroblasts are cultured at 5,000 cells/well in a 96-well plate for one day. After a medium change to 0.1% BSA basal medium, the cells are incubated with FGF-2 or with or without agonists or antagonists of the invention IL-1α for 24 hours. The supernatants are collected and assayed for IL-6 by ELISA kit (Endogen, Cambridge, Mass.).

[1098] Human lung fibroblasts are cultured with FGF-2 or agonists or antagonists of the invention for 3 days in basal medium before the addition of Alamar Blue to assess effects on growth of the fibroblasts. FGF-2 should show a stimulation at 10-2500 ng/ml which can be used to compare stimulation with agonists or antagonists of the invention.

[1099] Parkinson Models.

[1100] The loss of motor function in Parkinson's disease is attributed to a deficiency of striatal dopamine resulting from the degeneration of the nigrostriatal dopaminergic projection neurons. An animal model for Parkinson's that has been extensively characterized involves the systemic administration of 1-methyl-4 phenyl 1,2,3,6-tetrahydropyridine (MPTP). In the CNS, MPTP is taken-up by astrocytes and catabolized by monoamine oxidase B to 1-methyl-4-phenyl pyridine (MPP⁺) and released. Subsequently, MPP⁺ is actively accumulated in dopaminergic neurons by the high-affinity reuptake transporter for dopamine. MPP⁺ is then concentrated in mitochondria by the electrochemical gradient and selectively inhibits nicotidamide adenine disphosphate: ubiquinone oxidoreductionase (complex I), thereby interfering with electron transport and eventually generating oxygen radicals.

[1101] It has been demonstrated in tissue culture paradigms that FGF-2 (basic FGF) has trophic activity towards nigral dopaminergic neurons (Ferrari et al., Dev. Biol. 1989). Recently, Dr. Unsicker's group has demonstrated that administering FGF-2 in gel foam implants in the striatum results in the near complete protection of nigral dopaminergic neurons from the toxicity associated with MPTP exposure (Otto and Unsicker, J. Neuroscience, 1990).

[1102] Based on the data with FGF-2, agonists or antagonists of the invention can be evaluated to determine whether it has an action similar to that of FGF-2 in enhancing dopaminergic neuronal survival in vitro and it can also be tested in vivo for protection of dopaminergic neurons in the striatum from the damage associated with MPTP treatment. The potential effect of an agonist or antagonist of the invention is first examined in vitro in a dopaminergic neuronal cell culture paradigm. The cultures are prepared by dissecting the midbrain floor plate from gestation day 14 Wistar rat embryos. The tissue is dissociated with trypsin and seeded at a density of 200,000 cells/cm2 on polyorthinine-laminin coated glass coverslips. The cells are maintained in Dulbecco's Modified Eagle's medium and F12 medium containing hormonal supplements (NI). The cultures are fixed with paraformaldehyde after 8 days in vitro and are processed for tyrosine hydroxylase, a specific marker for dopaminergic neurons, immunohistochemical staining. Dissociated cell cultures are prepared from embryonic rats. The culture medium is changed every third day and the factors are also added at that time.

[1103] Since the dopaminergic neurons are isolated from animals at gestation day 14, a developmental time which is past the stage when the dopaminergic precursor cells are proliferating, an increase in the number of tyrosine hydroxylase immunopositive neurons would represent an increase in the number of dopaminergic neurons surviving in vitro. Therefore, if an agonist or antagonist of the invention acts to prolong the survival of dopaminergic neurons, it would suggest that the agonist or antagonist may be involved in Parkinson's Disease.

[1104] The studies described in this example tested activity of agonists or antagonists of the invention. However, one skilled in the art could easily modify the exemplified studies to test the activity of polynucleotides or polypeptides of the invention (e.g., gene therapy).

### Example 25

### The Effect of Agonists or Antagonists of the Invention on the Growth of Vascular Endothelial Cells

[1105] On day 1, human umbilical vein endothelial cells (HUVEC) are seeded at 2-5×10⁴ cells/35 mm dish density in M199 medium containing 4% fetal bovine serum (FBS), 16 units/ml heparin, and 50 units/ml endothelial cell growth supplements (ECGS, Biotechnique, Inc.). On day 2, the medium is replaced with M199 containing 10% FBS, 8 units/ml heparin. An agonist or antagonist of the invention, and positive controls, such as VEGF and basic FGF (bFGF) are added, at varying concentrations. On days 4 and 6, the medium is replaced. On day 8, cell number is determined with a Coulter Counter.

[1106] An increase in the number of HUVEC cells indicates that the compound of the invention may proliferate vascular endothelial cells, while a decrease in the number of HUVEC cells indicates that the compound of the invention inhibits vascular endothelial cells.

[1107] The studies described in this example tested activity of a polypeptide of the invention. However, one skilled in the art could easily modify the exemplified studies to test the activity of polynucleotides (e.g., gene therapy), agonists, and/or antagonists of the invention.

### Example 26

### Rat Corneal Wound Healing Model

[1108] This animal model shows the effect of an agonist or antagonist of the invention on neovascularization. The experimental protocol includes:

[1109] a) Making a 1-1.5 mm long incision from the center of cornea into the stromal layer.

[1110] b) Inserting a spatula below the lip of the incision facing the outer corner of the eye.

[1111] c) Making a pocket (its base is 1-1.5 mm form the edge of the eye).

[1112] d) Positioning a pellet, containing 50 ng-5 ug of an agonist or antagonist of the invention, within the pocket.

[1113] e) Treatment with an agonist or antagonist of the invention can also be applied topically to the corneal wounds in a dosage range of 20 mg-500 mg (daily treatment for five days).

[1114] The studies described in this example tested activity of agonists or antagonists of the invention. However, one skilled in the art could easily modify the exemplified studies to test the activity of polynucleotides or polypeptides of the invention (e.g., gene therapy).

### Example 27

### Diabetic Mouse and Glucocorticoid-impaired Wound Healing Models

[1115] Diabetic db+/db+ Mouse Model.

[1116] To demonstrate that an agonist or antagonist of the invention accelerates the healing process, the genetically diabetic mouse model of wound healing is used. The full thickness wound healing model in the db+/db+ mouse is a well characterized, clinically relevant and reproducible model of impaired wound healing. Healing of the diabetic wound is dependent on formation of granulation tissue and re-epithelialization rather than contraction (Gartner, M. H. et al., J. Surg. Res. 52:389 (1992); Greenhalgh, D. G. et al., Am. J. Pathol 136:1235 (1990)).

[1117] The diabetic animals have many of the characteristic features observed in Type II diabetes mellitus. Homozygous (db+/db+) mice are obese in comparison to their normal heterozygous (db+/+m) littermates. Mutant diabetic (db+/db+) mice have a single autosomal recessive mutation on chromosome 4 (db+) (Coleman et al. Proc. Natl. Acad. Sci. USA 77:283-293 (1982)). Animals show polyphagia, polydipsia and polyuria. Mutant diabetic mice (db+/db+) have elevated blood glucose, increased or normal insulin levels, and suppressed cell-mediated immunity (Mandel et al., J. Immunol. 120:1375 (1978); Debray-Sachs, M. et al., Clin. Exp. Immunol. 51(1):1-7 (1983); Leiter et al., Am. J. of Pathol. 114:46-55 (1985)). Peripheral neuropathy, myocardial complications, and microvascular lesions, basement membrane thickening and glomerular filtration abnormalities have been described in these animals (Norido, F. et al., Exp. Neurol. 83(2):221-232 (1984); Robertson et al., Diabetes 29(1):60-67 (1980); Giacomelli et al., Lab Invest. 40(4):460-473 (1979); Coleman, D. L., Diabetes 31 (Suppl):1-6 (1982)). These homozygous diabetic mice develop hyperglycemia that is resistant to insulin analogous to human type II diabetes (Mandel et al., J. Immunol. 120:1375-1377 (1978)).

[1118] The characteristics observed in these animals suggests that healing in this model may be similar to the healing observed in human diabetes (Greenhalgh, et al., Am. J. of Pathol. 136:1235-1246 (1990)).

[1119] Genetically diabetic female C57BL/KsJ (db+/db+) mice and their non-diabetic (db+/+m) heterozygous littermates are used in this study (Jackson Laboratories). The animals are purchased at 6 weeks of age and are 8 weeks old at the beginning of the study. Animals are individually housed and received food and water ad libitum. All manipulations are performed using aseptic techniques. The experiments are conducted according to the rules and guidelines of Human Genome Sciences, Inc. Institutional Animal Care and Use Committee and the Guidelines for the Care and Use of Laboratory Animals.

[1120] Wounding protocol is performed according to previously reported methods (Tsuboi, R. and Rifkin, D. B., J Exp. Med. 172:245-251 (1990)). Briefly, on the day of wounding, animals are anesthetized with an intraperitoneal injection of Avertin (0.01 mg/mL), 2,2,2-tribromoethanol and 2-methyl-2-butanol dissolved in deionized water. The dorsal region of the animal is shaved and the skin washed with 70% ethanol solution and iodine. The surgical area is dried with sterile gauze prior to wounding. An 8 mm full-thickness wound is then created using a Keyes tissue punch. Immediately following wounding, the surrounding skin is gently stretched to eliminate wound expansion. The wounds are left open for the duration of the experiment. Application of the treatment is given topically for 5 consecutive days commencing on the day of wounding. Prior to treatment, wounds are gently cleansed with sterile saline and gauze sponges.

[1121] Wounds are visually examined and photographed at a fixed distance at the day of surgery and at two day intervals thereafter. Wound closure is determined by daily measurement on days 1-5 and on day 8. Wounds are measured horizontally and vertically using a calibrated Jameson caliper. Wounds are considered healed if granulation tissue is no longer visible and the wound is covered by a continuous epithelium.

[1122] An agonist or antagonist of the invention is administered using at a range different doses, from 4 mg to 500 mg per wound per day for 8 days in vehicle. Vehicle control groups received 50 mL of vehicle solution.

[1123] Animals are euthanized on day 8 with an intraperitoneal injection of sodium pentobarbital (300 mg/kg). The wounds and surrounding skin are then harvested for histology and immunohistochemistry. Tissue specimens are placed in 10% neutral buffered formalin in tissue cassettes between biopsy sponges for further processing.

[1124] Three groups of 10 animals each (5 diabetic and 5 non-diabetic controls) are evaluated: 1) Vehicle placebo control, 2) untreated group, and 3) treated group.

[1125] Wound closure is analyzed by measuring the area in the vertical and horizontal axis and obtaining the total square area of the wound. Contraction is then estimated by establishing the differences between the initial wound area (day 0) and that of post treatment (day 8). The wound area on day 1 is 64 mm², the corresponding size of the dermal punch. Calculations are made using the following formula:

[Open area on day 8]−[Open area on day 1]/[Open area on day 1]

[1126] Specimens are fixed in 10% buffered formalin and paraffin embedded blocks are sectioned perpendicular to the wound surface (5 mm) and cut using a Reichert-Jung microtome. Routine hematoxylin-eosin (H&E) staining is performed on cross-sections of bisected wounds. Histologic examination of the wounds are used to assess whether the healing process and the morphologic appearance of the repaired skin is altered by treatment with an agonist or antagonist of the invention. This assessment included verification of the presence of cell accumulation, inflammatory cells, capillaries, fibroblasts, re-epithelialization and epidermal maturity (Greenhalgh, D.G. et al., Am. J. Pathol. 136:1235 (1990)). A calibrated lens micrometer is used by a blinded observer.

[1127] Tissue sections are also stained immunohistochemically with a polyclonal rabbit anti-human keratin antibody using ABC Elite detection system. Human skin is used as a positive tissue control while non-immune IgG is used as a negative control. Keratinocyte growth is determined by evaluating the extent of reepithelialization of the wound using a calibrated lens micrometer.

[1128] Proliferating cell nuclear antigen/cyclin (PCNA) in skin specimens is demonstrated by using anti-PCNA antibody (1:50) with an ABC Elite detection system. Human colon cancer served as a positive tissue control and human brain tissue is used as a negative tissue control. Each specimen included a section with omission of the primary antibody and substitution with non-immune mouse IgG. Ranking of these sections is based on the extent of proliferation on a scale of 0-8, the lower side of the scale reflecting slight proliferation to the higher side reflecting intense proliferation.

[1129] Experimental data are analyzed using an unpaired t test. A p value of <0.05 is considered significant.

[1130] Steroid Impaired Rat Model

[1131] The inhibition of wound healing by steroids has been well documented in various in vitro and in vivo systems (Wahl, Glucocorticoids and Wound healing. In: Anti-Inflammatory Steroid Action: Basic and Clinical Aspects. 280-302 (1989); Wahlet al., J. Immunol. 115: 476-481 (1975); Werb et al., J. Exp. Med. 147:1684-1694 (1978)). Glucocorticoids retard wound healing by inhibiting angiogenesis, decreasing vascular permeability (Ebert et al., An. Intern. Med. 37:701-705 (1952)), fibroblast proliferation, and collagen synthesis (Beck et al., Growth Factors. 5: 295-304 (1991); Haynes et al., J. Clin. Invest. 61: 703-797 (1978)) and producing a transient reduction of circulating monocytes (Haynes et al., J. Clin. Invest. 61: 703-797 (1978); Wahl, “Glucocorticoids and wound healing”, In: Antiinflammatory Steroid Action: Basic and Clinical Aspects, Academic Press, New York, pp. 280-302 (1989)). The systemic administration of steroids to impaired wound healing is a well establish phenomenon in rats (Beck et al., Growth Factors. 5: 295-304 (1991); Haynes et al., J. Clin. Invest. 61: 703-797 (1978); Wahl, “Glucocorticoids and wound healing”, In: Antiinflammatory Steroid Action: Basic and Clinical Aspects, Academic Press, New York, pp. 280-302 (1989); Pierce et al., Proc. Natl. Acad. Sci. USA 86: 2229-2233 (1989)).

[1132] To demonstrate that an agonist or antagonist of the invention can accelerate the healing process, the effects of multiple topical applications of the agonist or antagonist on full thickness excisional skin wounds in rats in which healing has been impaired by the systemic administration of methylprednisolone is assessed.

[1133] Young adult male Sprague Dawley rats weighing 250-300 g (Charles River Laboratories) are used in this example. The animals are purchased at 8 weeks of age and are 9 weeks old at the beginning of the study. The healing response of rats is impaired by the systemic administration of methylprednisolone (17 mg/kg/rat intramuscularly) at the time of wounding. Animals are individually housed and received food and water ad libitum. All manipulations are performed using aseptic techniques. This study is conducted according to the rules and guidelines of Human Genome Sciences, Inc. Institutional Animal Care and Use Committee and the Guidelines for the Care and Use of Laboratory Animals.

[1134] The wounding protocol is followed according to section A, above. On the day of wounding, animals are anesthetized with an intramuscular injection of ketamine (50 mg/kg) and xylazine (5 mg/kg). The dorsal region of the animal is shaved and the skin washed with 70% ethanol and iodine solutions. The surgical area is dried with sterile gauze prior to wounding. An 8 mm full-thickness wound is created using a Keyes tissue punch. The wounds are left open for the duration of the experiment. Applications of the testing materials are given topically once a day for 7 consecutive days commencing on the day of wounding and subsequent to methylprednisolone administration. Prior to treatment, wounds are gently cleansed with sterile saline and gauze sponges.

[1135] Wounds are visually examined and photographed at a fixed distance at the day of wounding and at the end of treatment. Wound closure is determined by daily measurement on days 1-5 and on day 8. Wounds are measured horizontally and vertically using a calibrated Jameson caliper. Wounds are considered healed if granulation tissue is no longer visible and the wound is covered by a continuous epithelium.

[1136] The agonist or antagonist of the invention is administered using at a range different doses, from 4 mg to 500 mg per wound per day for 8 days in vehicle. Vehicle control groups received 50 mL of vehicle solution.

[1137] Animals are euthanized on day 8 with an intraperitoneal injection of sodium pentobarbital (300 mg/kg). The wounds and surrounding skin are then harvested for histology. Tissue specimens are placed in 10% neutral buffered formalin in tissue cassettes between biopsy sponges for further processing.

[1138] Three groups of 10 animals each (5 with methylprednisolone and 5 without glucocorticoid) are evaluated: 1) Untreated group 2) Vehicle placebo control 3) treated groups.

[1139] Wound closure is analyzed by measuring the area in the vertical and horizontal axis and obtaining the total area of the wound. Closure is then estimated by establishing the differences between the initial wound area (day 0) and that of post treatment (day 8). The wound area on day 1 is 64 mm², the corresponding size of the dermal punch. Calculations are made using the following formula:

[Open area on day 8]−[Open area on day 1]/[Open area on day 1]

[1140] Specimens are fixed in 10% buffered formalin and paraffin embedded blocks are sectioned perpendicular to the wound surface (5 mm) and cut using an Olympus microtome. Routine hematoxylin-eosin (H&E) staining is performed on cross-sections of bisected wounds. Histologic examination of the wounds allows assessment of whether the healing process and the morphologic appearance of the repaired skin is improved by treatment with an agonist or antagonist of the invention. A calibrated lens micrometer is used by a blinded observer to determine the distance of the wound gap.

[1141] Experimental data are analyzed using an unpaired t test. A p value of <0.05 is considered significant.

[1142] The studies described in this example tested activity of agonists or antagonists of the invention. However, one skilled in the art could easily modify the exemplified studies to test the activity of polynucleotides or polypeptides of the invention (e.g., gene therapy).

### Example 28

### Lymphadema Animal Model

[1143] The purpose of this experimental approach is to create an appropriate and consistent lymphedema model for testing the therapeutic effects of an agonist or antagonist of the invention in lymphangiogenesis and re-establishment of the lymphatic circulatory system in the rat hind limb. Effectiveness is measured by swelling volume of the affected limb, quantification of the amount of lymphatic vasculature, total blood plasma protein, and histopathology. Acute lymphedema is observed for 7-10 days. Perhaps more importantly, the chronic progress of the edema is followed for up to 3-4 weeks.

[1144] Prior to beginning surgery, blood sample is drawn for protein concentration analysis. Male rats weighing approximately ˜350 g are dosed with Pentobarbital. Subsequently, the right legs are shaved from knee to hip. The shaved area is swabbed with gauze soaked in 70% EtOH. Blood is drawn for serum total protein testing. Circumference and volumetric measurements are made prior to injecting dye into paws after marking 2 measurement levels (0.5 cm above heel, at mid-pt of dorsal paw). The intradermal dorsum of both right and left paws are injected with 0.05 ml of 1% Evan's Blue. Circumference and volumetric measurements are then made following injection of dye into paws.

[1145] Using the knee joint as a landmark, a mid-leg inguinal incision is made circumferentially allowing the femoral vessels to be located. Forceps and hemostats are used to dissect and separate the skin flaps. After locating the femoral vessels, the lymphatic vessel that runs along side and underneath the vessel(s) is located. The main lymphatic vessels in this area are then electrically coagulated or suture ligated.

[1146] Using a microscope, muscles in back of the leg (near the semitendinosis and adductors) are bluntly dissected. The popliteal lymph node is then located. The 2 proximal and 2 distal lymphatic vessels and distal blood supply of the popliteal node are then ligated by suturing. The popliteal lymph node, and any accompanying adipose tissue, is then removed by cutting connective tissues.

[1147] Care is taken to control any mild bleeding resulting from this procedure. After lymphatics are occluded, the skin flaps are sealed by using liquid skin (Vetbond) (AJ Buck). The separated skin edges are sealed to the underlying muscle tissue while leaving a gap of ˜0.5 cm around the leg. Skin also may be anchored by suturing to underlying muscle when necessary.

[1148] To avoid infection, animals are housed individually with mesh (no bedding). Recovering animals are checked daily through the optimal edematous peak, which typically occurred by day 5-7. The plateau edematous peak are then observed. To evaluate the intensity of the lymphedema, the circumference and volumes of 2 designated places on each paw before operation and daily for 7 days are measured. The effect of plasma proteins on lymphedema is determined and whether protein analysis is a useful testing perimeter is also investigated. The weights of both control and edematous limbs are evaluated at 2 places. Analysis is performed in a blind manner.

[1149] Circumference Measurements: Under brief gas anesthetic to prevent limb movement, a cloth tape is used to measure limb circumference. Measurements are done at the ankle bone and dorsal paw by 2 different people and those 2 readings are averaged. Readings are taken from both control and edematous limbs.

[1150] Volumetric Measurements: On the day of surgery, animals are anesthetized with Pentobarbital and are tested prior to surgery. For daily volumetrics animals are under brief halothane anesthetic (rapid immobilization and quick recovery), and both legs are shaved and equally marked using waterproof marker on legs. Legs are first dipped in water, then dipped into instrument to each marked level then measured by Buxco edema software(Chen/Victor). Data is recorded by one person, while the other is dipping the limb to marked area.

[1151] Blood-plasma protein measurements: Blood is drawn, spun, and serum separated prior to surgery and then at conclusion for total protein and Ca2⁺ comparison.

[1152] Limb Weight Comparison: After drawing blood, the animal is prepared for tissue collection. The limbs are amputated using a quillitine, then both experimental and control legs are cut at the ligature and weighed. A second weighing is done as the tibio-cacaneal joint is disarticulated and the foot is weighed.

[1153] Histological Preparations: The transverse muscle located behind the knee (popliteal) area is dissected and arranged in a metal mold, filled with freezeGel, dipped into cold methylbutane, placed into labeled sample bags at −80 EC until sectioning. Upon sectioning, the muscle is observed under fluorescent microscopy for lymphatics.

[1154] The studies described in this example tested activity of agonists or antagonists of the invention. However, one skilled in the art could easily modify the exemplified studies to test the activity of polynucleotides or polypeptides of the invention (e.g., gene therapy).

### Example 29

### Suppression of TNF Alpha-induced Adhesion Molecule Expression by an Agonist or Antagonist of the Invention

[1155] The recruitment of lymphocytes to areas of inflammation and angiogenesis involves specific receptor-ligand interactions between cell surface adhesion molecules (CAMs) on lymphocytes and the vascular endothelium. The adhesion process, in both normal and pathological settings, follows a multi-step cascade that involves intercellular adhesion molecule-1 (ICAM-1), vascular cell adhesion molecule-1 (VCAM-1), and endothelial leukocyte adhesion molecule-1 (E-selectin) expression on endothelial cells (EC). The expression of these molecules and others on the vascular endothelium determines the efficiency with which leukocytes may adhere to the local vasculature and extravasate into the local tissue during the development of an inflammatory response. The local concentration of cytokines and growth factor participate in the modulation of the expression of these CAMs.

[1156] Tumor necrosis factor alpha (TNF-a), a potent proinflammatory cytokine, is a stimulator of all three CAMs on endothelial cells and may be involved in a wide variety of inflammatory responses, often resulting in a pathological outcome.

[1157] The potential of an agonist or antagonist of the invention to mediate a suppression of TNF-a induced CAM expression can be examined. A modified ELISA assay which uses ECs as a solid phase absorbent is employed to measure the amount of CAM expression on TNF-a treated ECs when co-stimulated with a member of the FGF family of proteins.

[1158] To perform the experiment, human umbilical vein endothelial cell (HUVEC) cultures are obtained from pooled cord harvests and maintained in growth medium (EGM-2; Clonetics, San Diego, Calif.) supplemented with 10% FCS and 1% penicillin/streptomycin in a 37 degree C humidified incubator containing 5% CO₂. HUVECs are seeded in 96-well plates at concentrations of 1×10⁴ cells/well in EGM medium at 37 degree C for 18-24 hrs or until confluent. The monolayers are subsequently washed 3 times with a serum-free solution of RPMI-1640 supplemented with 100 U/ml penicillin and 100 mg/ml streptomycin, and treated with a given cytokine and/or growth factor(s) for 24 h at 37 degree C. Following incubation, the cells are then evaluated for CAM expression.

[1159] Human Umbilical Vein Endothelial cells (HUVECs) are grown in a standard 96 well plate to confluence. Growth medium is removed from the cells and replaced with 90 ul of 199 Medium (10% FBS). Samples for testing and positive or negative controls are added to the plate in triplicate (in 10 ul volumes). Plates are incubated at 37 degree C for either 5 h (selectin and integrin expression) or 24 h (integrin expression only). Plates are aspirated to remove medium and 100 μl of 0.1% paraformaldehyde-PBS(with Ca++ and Mg++) is added to each well. Plates are held at 4° C. for 30 min.

[1160] Fixative is then removed from the wells and wells are washed 1X with PBS(+Ca,Mg)+0.5% BSA and drained. Do not allow the wells to dry. Add 10 μl of diluted primary antibody to the test and control wells. Anti-ICAM-1-Biotin, Anti-VCAM-1-Biotin and Anti-E-selectin-Biotin are used at a concentration of 10 μg/ml (1:10 dilution of 0.1 mg/ml stock antibody). Cells are incubated at 37° C. for 30 min. in a humidified environment. Wells are washed X3 with PBS(+Ca,Mg)+0.5% BSA.

[1161] Then add 20 μl of diluted ExtrAvidin-Alkaline Phosphotase (1:5,000 dilution) to each well and incubated at 37° C. for 30 min. Wells are washed X3 with PBS(+Ca,Mg)+0.5% BSA. 1 tablet of p-Nitrophenol Phosphate pNPP is dissolved in 5 ml of glycine buffer (pH 10.4). 100 μl of pNPP substrate in glycine buffer is added to each test well. Standard wells in triplicate are prepared from the working dilution of the ExtrAvidin-Alkaline Phosphotase in glycine buffer: 1:5,000 (10⁰)>10^{0.5}>10⁻¹>10⁻¹⁵0.5 μl of each dilution is added to triplicate wells and the resulting AP content in each well is 5.50 ng, 1.74 ng, 0.55 ng, 0.18 ng. 100 μl of pNNP reagent must then be added to each of the standard wells. The plate must be incubated at 37° C. for 4 h. A volume of 50 μl of 3M NaOH is added to all wells. The results are quantified on a plate reader at 405 nm. The background subtraction option is used on blank wells filled with glycine buffer only. The template is set up to indicate the concentration of AP-conjugate in each standard well [5.50 ng; 1.74 ng; 0.55 ng; 0.18 ng]. Results are indicated as amount of bound AP-conjugate in each sample.

[1162] The studies described in this example tested activity of agonists or antagonists of the invention. However, one skilled in the art could easily modify the exemplified studies to test the activity of polynucleotides or polypeptides of the invention (e.g., gene therapy).

### Example 30

### Production of Polypeptide of the Invention for High-throughput Screening Assays

[1163] The following protocol produces a supernatant containing polypeptide of the present invention to be tested. This supernatant can then be used in the Screening Assays described in Examples 32-41.

[1164] First, dilute Poly-D-Lysine (644 587 Boehringer-Mannheim) stock solution (lmg/ml in PBS) 1:20 in PBS (w/o calcium or magnesium 17-516F Biowhittaker) for a working solution of 50 ug/ml. Add 200 ul of this solution to each well (24 well plates) and incubate at RT for 20 minutes. Be sure to distribute the solution over each well (note: a 12-channel pipetter may be used with tips on every other channel). Aspirate off the Poly-D-Lysine solution and rinse with 1 ml PBS (Phosphate Buffered Saline). The PBS should remain in the well until just prior to plating the cells and plates may be poly-lysine coated in advance for up to two weeks.

[1165] Plate 293T cells (do not carry cells past P+20) at 2×10⁵ cells/well in 0.5 ml DMEM(Dulbecco's Modified Eagle Medium)(with 4.5 G/L glucose and L-glutamine (12-604F Biowhittaker))/10% heat inactivated FBS(14-503F Biowhittaker)/lx Penstrep(17-602E Biowhittaker). Let the cells grow overnight.

[1166] The next day, mix together in a sterile solution basin: 300 ul Lipofectamine (18324-012 Gibco/BRL) and 5 ml Optimem 1 (31985070 Gibco/BRL)/96-well plate. With a small volume multi-channel pipetter, aliquot approximately 2 ug of an expression vector containing a polynucleotide insert, produced by the methods described in Examples 8-10, into an appropriately labeled 96-well round bottom plate. With a multi-channel pipetter, add 50 ul of the Lipofectamine/Optimem I mixture to each well. Pipette up and down gently to mix. Incubate at RT 15-45 minutes. After about 20 minutes, use a multi-channel pipetter to add 150 ul Optimem I to each well. As a control, one plate of vector DNA lacking an insert should be transfected with each set of transfections.

[1167] Preferably, the transfection should be performed by tag-teaming the following tasks. By tag-teaming, hands on time is cut in half, and the cells do not spend too much time on PBS. First, person A aspirates off the media from four 24-well plates of cells, and then person B rinses each well with 0.5-1 ml PBS. Person A then aspirates off PBS rinse, and person B, using a 12-channel pipetter with tips on every other channel, adds the 200 ul of DNA/Lipofectamine/Optimem I complex to the odd wells first, then to the even wells, to each row on the 24-well plates. Incubate at 37 degree C for 6 hours.

[1168] While cells are incubating, prepare appropriate media, either 1%BSA in DMEM with 1× penstrep, or HGS CHO-5 media (116.6 mg/L of CaCl2 (anhyd); 0.00130 mg/L CuSO₄-5H₂O; 0.050 mg/L of Fe(NO₃)₃-9H₂O; 0.417 mg/L of FeSO₄-7H₂O; 311.80 mg/L of Kcl; 28.64 mg/L of MgCl₂; 48.84 mg/L of MgSO₄; 6995.50 mg/L of NaCl; 2400.0 mg/L of NaHCO₃; 62.50 mg/L of NaH₂PO₄-H₂O; 71.02 mg/L of Na₂HPO_{4;} 0.4320 mg/L of ZnSO₄-7H₂O; 0.002 mg/L of Arachidonic Acid ; 1.022 mg/L of Cholesterol; 0.070 mg/L of DL-alpha-Tocopherol-Acetate; 0.0520 mg/L of Linoleic Acid; 0.010 mg/L of Linolenic Acid; 0.010 mg/L of Myristic Acid; 0.010 mg/L of Oleic Acid; 0.010 mg/L of Palmitric Acid; 0.010 mg/L of Palmitic Acid; 100 mg/L of Pluronic F-68; 0.010 mg/L of Stearic Acid; 2.20 mg/L of Tween 80; 4551 mg/L of D-Glucose; 130.85 mg/ml of L- Alanine; 147.50 mg/ml of L-Arginine-HCL; 7.50 mg/ml of L-Asparagine-H₂O; 6.65 mg/ml of L-Aspartic Acid; 29.56 mg/ml of L-Cystine-2HCL-H₂O; 31.29 mg/ml of L-Cystine-2HCL; 7.35 mg/ml of L-Glutamic Acid; 365.0 mg/ml of L-Glutamine; 18.75 mg/ml of Glycine; 52.48 mg/ml of L-Histidine-HCL-H₂O; 106.97 mg/ml of L-Isoleucine; 111.45 mg/ml of L-Leucine; 163.75 mg/ml of L-Lysine HCL; 32.34 mg/ml of L-Methionine; 68.48 mg/ml of L-Phenylalainine; 40.0 mg/ml of L-Proline; 26.25 mg/ml of L-Serine; 101.05 mg/ml of L-Threonine; 19.22 mg/ml of L-Tryptophan; 91.79 mg/ml of L-Tryrosine-2Na-2H₂O; and 99.65 mg/ml of L-Valine; 0.0035 mg/L of Biotin; 3.24 mg/L of D-Ca Pantothenate; 11.78 mg/L of Choline Chloride; 4.65 mg/L of Folic Acid; 15.60 mg/L of i-Inositol; 3.02 mg/L of Niacinamide; 3.00 mg/L of Pyridoxal HCL; 0.031 mg/L of Pyridoxine HCL; 0.319 mg/L of Riboflavin; 3.17 mg/L of Thiamine HCL; 0.365 mg/L of Thymidine; 0.680 mg/L of Vitamin B₁₂; 25 mM of HEPES Buffer; 2.39 mg/L of Na Hypoxanthine; 0.105 mg/L of Lipoic Acid; 0.081 mg/L of Sodium Putrescine-2HCL; 55.0 mg/L of Sodium Pyruvate; 0.0067 mg/L of Sodium Selenite; 20 uM of Ethanolamine; 0.122 mg/L of Ferric Citrate; 41.70 mg/L of Methyl-B-Cyclodextrin complexed with Linoleic Acid; 33.33 mg/L of Methyl-B-Cyclodextrin complexed with Oleic Acid; 10 mg/L of Methyl-B-Cyclodextrin complexed with Retinal Acetate. Adjust osmolarity to 327 mOsm) with 2 mm glutamine and 1× penstrep. (BSA (81-068-3 Bayer) 100 gm dissolved in 1 L DMEM for a 10% BSA stock solution). Filter the media and collect 50 ul for endotoxin assay in 15 ml polystyrene conical.

[1169] The transfection reaction is terminated, preferably by tag-teaming, at the end of the incubation period. Person A aspirates off the transfection media, while person B adds 1.5 ml appropriate media to each well. Incubate at 37 degree C for 45 or 72 hours depending on the media used: 1%BSA for 45 hours or CHO-5 for 72 hours.

[1170] On day four, using a 300 ul multichannel pipetter, aliquot 600 ul in one 1 ml deep well plate and the remaining supernatant into a 2 ml deep well. The supernatants from each well can then be used in the assays described in Examples 32-39.

[1171] It is specifically understood that when activity is obtained in any of the assays described below using a supernatant, the activity originates from either the polypeptide of the present invention directly (e.g., as a secreted protein) or by polypeptide of the present invention inducing expression of other proteins, which are then secreted into the supernatant. Thus, the invention further provides a method of identifying the protein in the supernatant characterized by an activity in a particular assay.

### Example 31

### Construction of GAS Reporter Construct

[1172] One signal transduction pathway involved in the differentiation and proliferation of cells is called the Jaks-STATs pathway. Activated proteins in the Jaks-STATs pathway bind to gamma activation site “GAS” elements or interferon-sensitive responsive element (“ISRE”), located in the promoter of many genes. The binding of a protein to these elements alter the expression of the associated gene.

[1173] GAS and ISRE elements are recognized by a class of transcription factors called Signal Transducers and Activators of Transcription, or “STATs.” There are six members of the STATs family. Statl and Stat3 are present in many cell types, as is Stat2 (as response to IFN-alpha is widespread). Stat4 is more restricted and is not in many cell types though it has been found in T helper class I, cells after treatment with IL-12. Stat5 was originally called mammary growth factor, but has been found at higher concentrations in other cells including myeloid cells. It can be activated in tissue culture cells by many cytokines.

[1174] The STATs are activated to translocate from the cytoplasm to the nucleus upon tyrosine phosphorylation by a set of kinases known as the Janus Kinase (“Jaks”) family. Jaks represent a distinct family of soluble tyrosine kinases and include Tyk2, Jakl, Jak2, and Jak3. These kinases display significant sequence similarity and are generally catalytically inactive in resting cells.

[1175] The Jaks are activated by a wide range of receptors summarized in the Table below. (Adapted from review by Schidler and Darnell, Ann. Rev. Biochem. 64:621-51 (1995)). A cytokine receptor family, capable of activating Jaks, is divided into two groups: (a) Class 1 includes receptors for IL-2, IL-3, IL-4, IL-6, IL-7, IL-9, IL-I1, IL-12, IL-15, Epo, PRL, GH, G-CSF, GM-CSF, LIF, CNTF, and thrombopoietin; and (b) Class 2 includes IFN-a, IFN-g, and IL-10. The Class 1 receptors share a conserved cysteine motif (a set of four conserved cysteines and one tryptophan) and a WSXWS motif (a membrane proximal region encoding Trp-Ser-Xaa-Trp-Ser (SEQ ID NO: 2)).

[1176] Thus, on binding of a ligand to a receptor, Jaks are activated, which in turn activate STATs, which then translocate and bind to GAS elements. This entire process is encompassed in the Jaks-STATs signal transduction pathway.

[1177] Therefore, activation of the Jaks-STATs pathway, reflected by the binding of the GAS or the ISRE element, can be used to indicate proteins involved in the proliferation and differentiation of cells. For example, growth factors and cytokines are known to activate the Jaks-STATs pathway (See Table below). Thus, by using GAS elements linked to reporter molecules, activators of the Jaks-STATs pathway can be identified.

| | JAKs | | | | | |
|---|---|---|---|---|---|---|
| Ligand | tyk2 | Jak1 | Jak2 | Jak3 | STATS | GAS(elements) or ISRE |
| IIFN family | | | | | | |
| IIFN-a/B | + | + | − | − | 1, 2, 3 | ISRE |
| IFN-g | | + | + | − | 1 | GAS (IRF1>Lys6>IFP) |
| Il-10 | + | ? | ? | − | 1, 3 | |
| gp130 family | | | | | | |
| IL-6 (Piciotropic) | + | + | + | ? | 1, 3 | GAS (IRE1>Lys6 >IFP) |
| Il-11 (Pleiotropic) | ? | + | ? | ? | 1, 3 | |
| OnM (Pleiotropic) | ? | + | + | ? | 1, 3 | |
| LIF (Pleiotropic) | ? | + | + | ? | 1, 3 | |
| CNTF (Pleiotropic) | −/+ | + | + | ? | 1, 3 | |
| G-CSF (Pleiotropic) | ? | + | ? | ? | 1, 3 | |
| IL-12 (Pleiotropic) | + | − | + | + | 1, 3 | |
| g-C family | | | | | | |
| IL-2 (lymphocytes) | − | + | − | + | 1, 3, 5 | GAS |
| IL-4 (lymphlmyeloid) | − | + | − | + | 6 | GAS (IRF1 = IFP |
| >>Ly6)(IgH) | | | | | | |
| IL-7 (lymphocytes) | − | + | − | + | 5 | GAS |
| IL-9 (lymphocytes) | − | + | − | + | 5 | GAS |
| IL-13 (lymphocyte) | − | + | ? | ? | 6 | GAS |
| IL-15 | ? | + | ? | + | 5 | GAS |
| gp140 family | | | | | | |
| IL-3 (myeloid) | − | − | + | − | 5 | GAS (IRE1>IFP>>Ly6) |
| IL-5 (myeloid) | − | − | + | − | 5 | GAS |
| GM-CSF (mycloid) | − | − | + | − | 5 | GAS |
| Growth hormone family | | | | | | |
| GH | ? | − | + | − | 5 | |
| PRL | ? | +/− | + | − | 1, 3, 5 | |
| EPO | ? | − | + | − | 5 | GAS(B |
| CAS>IRF1 = TFP>>Ly6) | | | | | | |
| Receptor Tyrosine Kinases | | | | | | |
| EGF | ? | + | + | − | 1, 3 | GAS (IRF1) |
| PDGF | ? | + | + | − | 1, 3 | |
| CSF-1 | ? | + | + | − | 1, 3 | GAS (not IRF1) |

[1178] To construct a synthetic GAS containing promoter element, which is used in the Biological Assays described in Examples 32-33, a PCR based strategy is employed to generate a GAS-SV40 promoter sequence. The 5′ primer contains four tandem copies of the GAS binding site found in the IRFI promoter and previously demonstrated to bind STATs upon induction with a range of cytokines (Rothman et al., Immunity 1:457-468 (1994).), although other GAS or ISRE elements can be used instead. The 5′ primer also contains 18 bp of sequence complementary to the SV40 early promoter sequence and is flanked with an XhoI site. The sequence of the 5′ primer is:

| | |
|---|---|
| 5′:GCGCCTCGAGATTTCCCCGAAATCTAGATTTCCCCGAAATGATTTCCCCGAAAT | (SEQ ID NO: 3) |
| GATTTCCCCGAAATATCTGCCATCTCAATTAG:3′ | |

[1179] The downstream primer is complementary to the SV40 promoter and is flanked with a Hind III site: 5′:GCGGCAAGCTTTTTGCAAAGCCTAGGC:3′ (SEQ ID NO: 4)

[1180] PCR amplification is performed using the SV40 promoter template present in the B-gal:promoter plasmid obtained from Clontech. The resulting PCR fragment is digested with XhoI/Hind III and subcloned into BLSK2−. (Stratagene.) Sequencing with forward and reverse primers confirms that the insert contains the following sequence:

| | |
|---|---|
| 5′:CTCGAGATTTCCCCGAAATCTAGATTTCCCCGAAATGATTTCCCCGAAATGATT | (SEQ ID NO: 5) |
| TCCCCGAAATATCTGCCATCTCAATTAGTCAGCAACCATAGTCCCGCCCCTAACT | |
| CCGCCCATCCCGCCCCTAACTCCGCCCAGTTCCGCCCATTCTCCGCCCCATGGCTG | |
| ACTAATTTTTTTTATTTATGCAGAGGCCGAGGCCGCCTCGGCCTCTGAGCTATTCC | |
| AGAAGTAGTGAGGAGGCTTTTTTGGAGGCCTAGGCTTTTGCAAAAAGCTT:3′ | |

[1181] With this GAS promoter element linked to the SV40 promoter, a GAS:SEAP2 reporter construct is next engineered. Here, the reporter molecule is a secreted alkaline phosphatase, or “SEAP.” Clearly, however, any reporter molecule can be instead of SEAP, in this or in any of the other Examples. Well known reporter molecules that can be used instead of SEAP include chloramphenicol acetyltransferase (CAT), luciferase, alkaline phosphatase, B-galactosidase, green fluorescent protein (GFP), or any protein detectable by an antibody.

[1182] The above sequence confirmed synthetic GAS-SV40 promoter element is subcloned into the pSEAP-Promoter vector obtained from Clontech using HindIII and XhoI, effectively replacing the SV40 promoter with the amplified GAS:SV40 promoter element, to create the GAS-SEAP vector. However, this vector does not contain a neomycin resistance gene, and therefore, is not preferred for mammalian expression systems.

[1183] Thus, in order to generate mammalian stable cell lines expressing the GAS-SEAP reporter, the GAS-SEAP cassette is removed from the GAS-SEAP vector using SalI and NotI, and inserted into a backbone vector containing the neomycin resistance gene, such as pGFP-1 (Clontech), using these restriction sites in the multiple cloning site, to create the GAS-SEAP/Neo vector. Once this vector is transfected into mammalian cells, this vector can then be used as a reporter molecule for GAS binding as described in Examples 32-33.

[1184] Other constructs can be made using the above description and replacing GAS with a different promoter sequence. For example, construction of reporter molecules containing EGR and NF-KB promoter sequences are described in Examples 34 and 35. However, many other promoters can be substituted using the protocols described in these Examples. For instance, SRE, IL-2, NFAT, or Osteocalcin promoters can be substituted, alone or in combination (e.g., GAS/NF-KB/EGR, GAS/NF-KB, I1-2/NFAT, or NF-KB/GAS). Similarly, other cell lines can be used to test reporter construct activity, such as HELA (epithelial), HUVEC (endothelial), Reh (B-cell), Saos-2 (osteoblast), HUVAC (aortic), or Cardiomyocyte.

### Example 32

### High-throughput Screening Assay for T-cell Activity

[1185] The following protocol is used to assess T-cell activity by identifying factors, and determining whether supernate containing a polypeptide of the invention proliferates and/or differentiates T-cells. T-cell activity is assessed using the GAS/SEAP/Neo construct produced in Example 31. Thus, factors that increase SEAP activity indicate the ability to activate the Jaks-STATS signal transduction pathway. The T-cell used in this assay is Jurkat T-cells (ATCC Accession No. TIB-152), although Molt-3 cells (ATCC Accession No. CRL-1552) and Molt-4 cells (ATCC Accession No. CRL-1582) cells can also be used.

[1186] Jurkat T-cells are lymphoblastic CD4+Thl helper cells. In order to generate stable cell lines, approximately 2 million Jurkat cells are transfected with the GAS-SEAP/neo vector using DMRIE-C (Life Technologies)(transfection procedure described below). The transfected cells are seeded to a density of approximately 20,000 cells per well and transfectants resistant to 1 mg/ml genticin selected. Resistant colonies are expanded and then tested for their response to increasing concentrations of interferon gamma. The dose response of a selected clone is demonstrated.

[1187] Specifically, the following protocol will yield sufficient cells for 75 wells containing 200 ul of cells. Thus, it is either scaled up, or performed in multiple to generate sufficient cells for multiple 96 well plates. Jurkat cells are maintained in RPMI +10% serum with 1/oPen-Strep. Combine 2.5 mls of OPTI-MEM (Life Technologies) with 10 ug of plasmid DNA in a T25 flask. Add 2.5 ml OPTI-MEM containing 50 ul of DMRIE-C and incubate at room temperature for 15-45 mins.

[1188] During the incubation period, count cell concentration, spin down the required number of cells (1 per transfection), and resuspend in OPTI-MEM to a final concentration of 10⁷ cells/ml. Then add 1 ml of 1×10⁷ cells in OPTI-MEM to T25 flask and incubate at 37 degree C for 6 hrs. After the incubation, add 10 ml of RPMI+15% serum.

[1189] The Jurkat:GAS-SEAP stable reporter lines are maintained in RPMI+10% serum, 1 mg/ml Genticin, and 1% Pen-Strep. These cells are treated with supernatants containing polypeptide of the present invention or polypeptide of the present invention induced polypeptides as produced by the protocol described in Example 30.

[1190] On the day of treatment with the supernatant, the cells should be washed and resuspended in fresh RPMI+10% serum to a density of 500,000 cells per ml. The exact number of cells required will depend on the number of supernatants being screened. For one 96 well plate, approximately 10 million cells (for 10 plates, 100 million cells) are required.

[1191] Transfer the cells to a triangular reservoir boat, in order to dispense the cells into a 96 well dish, using a 12 channel pipette. Using a 12 channel pipette, transfer 200 ul of cells into each well (therefore adding 100, 000 cells per well).

[1192] After all the plates have been seeded, 50 ul of the supernatants are transferred directly from the 96 well plate containing the supernatants into each well using a 12 channel pipette. In addition, a dose of exogenous interferon gamma (0.1, 1.0, 10 ng) is added to wells H9, H10, and H11 to serve as additional positive controls for the assay.

[1193] The 96 well dishes containing Jurkat cells treated with supernatants are placed in an incubator for 48 hrs (note: this time is variable between 48-72 hrs). 35 ul samples from each well are then transferred to an opaque 96 well plate using a 12 channel pipette. The opaque plates should be covered (using sellophene covers) and stored at -20 degree C until SEAP assays are performed according to Example 36. The plates containing the remaining treated cells are placed at 4 degree C and serve as a source of material for repeating the assay on a specific well if desired.

[1194] As a positive control, 100 Unit/ml interferon gamma can be used which is known to activate Jurkat T cells. Over 30 fold induction is typically observed in the positive control wells.

[1195] The above protocol may be used in the generation of both transient, as well as, stable transfected cells, which would be apparent to those of skill in the art.

### Example 33

### High-throughput Screening Assay Identifying Myeloid Activity

[1196] The following protocol is used to assess myeloid activity of polypeptide of the present invention by determining whether polypeptide of the present invention proliferates and/or differentiates myeloid cells. Myeloid cell activity is assessed using the GAS/SEAP/Neo construct produced in Example 31. Thus, factors that increase SEAP activity indicate the ability to activate the Jaks-STATS signal transduction pathway. The myeloid cell used in this assay is U937, a pre-monocyte cell line, although TF-1, HL60, or KG1 can be used.

[1197] To transiently transfect U937 cells with the GAS/SEAP/Neo construct produced in Example 31, a DEAE-Dextran method (Kharbanda et. al., 1994, Cell Growth & Differentiation, 5:259-265) is used. First, harvest 2×10⁷ U937 cells and wash with PBS. The U937 cells are usually grown in RPMI 1640 medium containing 10% heat-inactivated fetal bovine serum (FBS) supplemented with 100 units/ml penicillin and 100 mg/ml streptomycin.

[1198] Next, suspend the cells in 1 ml of 20 mM Tris-HCl (pH 7.4) buffer containing 0.5 mg/ml DEAE-Dextran, 8 ug GAS-SEAP2 plasmid DNA, 140 mM NaCl, 5 mM KCl, 375 uM Na₂HPO₄.7H₂O, 1 mM MgCl₂, and 675 uM CaCl₂. Incubate at 37 degrees C for 45 min.

[1199] Wash the cells with RPMI 1640 medium containing 10% FBS and then resuspend in 10 ml complete medium and incubate at 37 degree C for 36 hr.

[1200] The GAS-SEAP/U937 stable cells are obtained by growing the cells in 400 ug/ml G418. The G418-free medium is used for routine growth but every one to two months, the cells should be re-grown in 400 ug/ml G418 for couple of passages.

[1201] These cells are tested by harvesting 1×10⁸ cells (this is enough for ten 96-well plates assay) and wash with PBS. Suspend the cells in 200 ml above described growth medium, with a final density of 5×10⁵ cells/ml. Plate 200 ul cells per well in the 96-well plate (or 1×10⁵ cells/well).

[1202] Add 50 ul of the supernatant prepared by the protocol described in Example 30. Incubate at 37 degee C for 48 to 72 hr. As a positive control, 100 Unit/ml interferon gamma can be used which is known to activate U937 cells. Over 30 fold induction is typically observed in the positive control wells. SEAP assay the supernatant according to the protocol described in Example 36.

### Example 34

### High-throughput Screening Assay Identifying Neuronal Activity

[1203] When cells undergo differentiation and proliferation, a group of genes are activated through many different signal transduction pathways. One of these genes, EGR1 (early growth response gene 1), is induced in various tissues and cell types upon activation. The promoter of EGR1 is responsible for such induction. Using the EGR1 promoter linked to reporter molecules, activation of cells can be assessed by polypeptide of the present invention.

[1204] Particularly, the following protocol is used to assess neuronal activity in PC12 cell lines. PC 12 cells (rat phenochromocytoma cells) are known to proliferate and/or differentiate by activation with a number of mitogens, such as TPA (tetradecanoyl phorbol acetate), NGF (nerve growth factor), and EGF (epidermal growth factor). The EGR1 gene expression is activated during this treatment. Thus, by stably transfecting PC12 cells with a construct containing an EGR promoter linked to SEAP reporter, activation of PC12 cells by polypeptide of the present invention can be assessed.

[1205] The EGR/SEAP reporter construct can be assembled by the following protocol. The EGR-1 promoter sequence (−633 to +1)(Sakamoto K et al., Oncogene 6:867-871 (1991)) can be PCR amplified from human genomic DNA using the following primers:

5′ GCGCTCGAGGGATGACAGCGATAGAACCCCGG3′
(SEQ ID NO: 6)
5′ GCGAAGCTTCGCGACTCCCCGGATCCGCCTC-3′
(SEQ ID NO: 7)

[1206] Using the GAS:SEAP/Neo vector produced in Example 31, EGR1 amplified product can then be inserted into this vector. Linearize the GAS:SEAP/Neo vector using restriction enzymes XhoI/HindIII, removing the GAS/SV40 stuffer. Restrict the EGR1 amplified product with these same enzymes. Ligate the vector and the EGR1 promoter.

[1207] To prepare 96 well-plates for cell culture, two mls of a coating solution (1:30 dilution of collagen type I (Upstate Biotech Inc. Cat#08-115) in 30% ethanol (filter sterilized)) is added per one 10 cm plate or 50 ml per well of the 96-well plate, and allowed to air dry for 2 hr.

[1208] PC12 cells are routinely grown in RPMI-1640 medium (Bio Whittaker) containing 10% horse serum (JRH BIOSCIENCES, Cat. # 12449-78P), 5% heat-inactivated fetal bovine serum (FBS) supplemented with 100 units/ml penicillin and 100 ug/ml streptomycin on a precoated 10 cm tissue culture dish. One to four split is done every three to four days. Cells are removed from the plates by scraping and resuspended with pipetting up and down for more than 15 times.

[1209] Transfect the EGR/SEAP/Neo construct into PC12 using the Lipofectamine protocol described in Example 30. EGR-SEAP/PC12 stable cells are obtained by growing the cells in 300 ug/ml G418. The G418-free medium is used for routine growth but every one to two months, the cells should be re-grown in 300 ug/ml G418 for couple of passages.

[1210] To assay for neuronal activity, a 10 cm plate with cells around 70 to 80% confluent is screened by removing the old medium. Wash the cells once with PBS (Phosphate buffered saline). Then starve the cells in low serum medium (RPMI-1640 containing 1% horse serum and 0.5% FBS with antibiotics) overnight.

[1211] The next morning, remove the medium and wash the cells with PBS. Scrape off the cells from the plate, suspend the cells well in 2 ml low serum medium. Count the cell number and add more low serum medium to reach final cell density as 5×10⁵ cells/ml.

[1212] Add 200 ul of the cell suspension to each well of 96-well plate (equivalent to 1×10⁵ cells/well). Add 50 ul supernatant produced by Example 30, 37 degree C for 48 to 72 hr. As a positive control, a growth factor known to activate PC12 cells through EGR can be used, such as 50 ng/ul of Neuronal Growth Factor (NGF). Over fifty-fold induction of SEAP is typically seen in the positive control wells. SEAP assay the supernatant according to Example 36.

### Example 35

### High-throughput Screening Assay for T-cell Activity

[1213] NF-KB (Nuclear Factor KB) is a transcription factor activated by a wide variety of agents including the inflammatory cytokines IL-1 and TNF, CD30 and CD40, lymphotoxin-alpha and lymphotoxin-beta, by exposure to LPS or thrombin, and by expression of certain viral gene products. As a transcription factor, NF-KB regulates the expression of genes involved in immune cell activation, control of apoptosis (NF- KB appears to shield cells from apoptosis), B and T-cell development, anti-viral and antimicrobial responses, and multiple stress responses.

[1214] In non-stimulated conditions, NF-KB is retained in the cytoplasm with I-KB (Inhibitor KB). However, upon stimulation, I-KB is phosphorylated and degraded, causing NF- KB to shuttle to the nucleus, thereby activating transcription of target genes. Target genes activated by NF-KB include IL-2, IL-6, GM-CSF, ICAM-1 and class 1 MHC.

[1215] Due to its central role and ability to respond to a range of stimuli, reporter constructs utilizing the NF-KB promoter element are used to screen the supernatants produced in Example 30. Activators or inhibitors of NF-KB would be useful in treating, preventing, and/or diagnosing diseases. For example, inhibitors of NF-KB could be used to treat those diseases related to the acute or chronic activation of NF-KB, such as rheumatoid arthritis.

[1216] To construct a vector containing the NF-KB promoter element, a PCR based strategy is employed. The upstream primer contains four tandem copies of the NF-KB binding site (GGGGACTTTCCC) (SEQ ID NO: 8), 18 bp of sequence complementary to the 5′ end of the SV40 early promoter sequence, and is flanked with an XhoI site:

| | |
|---|---|
| 5′:GCGGCCTCGAGGGGACTTTCCCGGGGACTTTCCGGGGACTTTCCGGGACTTTC | (SEQ ID NO: 9) |
| CATCCTGCCATCTCAATTAG:3′ | |

[1217] The downstream primer is complementary to the 3′ end of the SV40 promoter and is flanked with a Hind III site:

[1218] 5′:GCGGCAAGCTTTTTGCAAAGCCTAGGC:3′ (SEQ ID NO: 4)

[1219] PCR amplification is performed using the SV40 promoter template present in the pB-gal:promoter plasmid obtained from Clontech. The resulting PCR fragment is digested with XhoI and Hind III and subcloned into BLSK2−. (Stratagene) Sequencing with the T7 and T3 primers confirms the insert contains the following sequence:

| | |
|---|---|
| 5′:CTCGAGGGGACTTTCCCGGGGACTTTCCGGGGACTTTCCGGGACTTTCCATCTG | (SEQ ID NO: 10) |
| CCATCTCAATTAGTCAGCAACCATAGTCCCGCCCCTAACTCCGCCCATCCCGCCC | |
| CTAACTCCGCCCAGTTCCGCCCATTCTCCGCCCCATGGCTGACTAATTTTTTTTAT | |
| TTATGCAGAGGCCGAGGCCGCCTCGGCCTCTGAGCTATTCCAGAAGTAGTGAGG | |
| AGGCTTTTTTGGAGGCCTAGGCTTTTGCAAAAAGCTT:3′ | |

[1220] Next, replace the SV40 minimal promoter element present in the pSEAP2-promoter plasmid (Clontech) with this NF-KB/SV40 fragment using XhoI and HindlIl. However, this vector does not contain a neomycin resistance gene, and therefore, is not preferred for mammalian expression systems.

[1221] In order to generate stable mammalian cell lines, the NF-KB/SV40/SEAP cassette is removed from the above NF-KB/SEAP vector using restriction enzymes SalI and NotI, and inserted into a vector containing neomycin resistance. Particularly, the NF-KB/SV40/SEAP cassette was inserted into pGFP-1 (Clontech), replacing the GFP gene, after restricting pGFP-1 with SalI and NotI.

[1222] Once NF-KB/SV40/SEAP/Neo vector is created, stable Jurkat T-cells are created and maintained according to the protocol described in Example 32. Similarly, the method for assaying supernatants with these stable Jurkat T-cells is also described in Example 32. As a positive control, exogenous TNF alpha (0.1,1, 10 ng) is added to wells H9, H10, and H11, with a 5-10 fold activation typically observed.

### Example 36

### Assay for SEAP Activity

[1223] As a reporter molecule for the assays described in Examples 32-35, SEAP activity is assayed using the Tropix Phospho-light Kit (Cat. BP-400) according to the following general procedure. The Tropix Phospho-light Kit supplies the Dilution, Assay, and Reaction Buffers used below.

[1224] Prime a dispenser with the 2.5× Dilution Buffer and dispense 15 ul of 2.5× dilution buffer into Optiplates containing 35 ul of a supernatant. Seal the plates with a plastic sealer and incubate at 65 degree C for 30 min. Separate the Optiplates to avoid uneven heating.

[1225] Cool the samples to room temperature for 15 minutes. Empty the dispenser and prime with the Assay Buffer. Add 50 ml Assay Buffer and incubate at room temperature 5 min. Empty the dispenser and prime with the Reaction Buffer (see the Table below). Add 50 ul Reaction Buffer and incubate at room temperature for 20 minutes. Since the intensity of the chemiluminescent signal is time dependent, and it takes about 10 minutes to read 5 plates on a luminometer, thus one should treat 5 plates at each time and start the second set 10 minutes later.

[1226] Read the relative light unit in the luminometer. Set H12 as blank, and print the results. An increase in chemiluminescence indicates reporter activity.

Reaction Buffer Formulation:

| # of plates | Rxn buffer diluent (ml) | CSPD (ml) |
|---|---|---|
| 10 | 60 | 3 |
| 11 | 65 | 3.25 |
| 12 | 70 | 3.5 |
| 13 | 75 | 3.75 |
| 14 | 80 | 4 |
| 15 | 85 | 4.25 |
| 16 | 90 | 4.5 |
| 17 | 95 | 4.75 |
| 18 | 100 | 5 |
| 19 | 105 | 5.25 |
| 20 | 110 | 5.5 |
| 21 | 115 | 5.75 |
| 22 | 120 | 6 |
| 23 | 125 | 6.25 |
| 24 | 130 | 6.5 |
| 25 | 135 | 6.75 |
| 26 | 140 | 7 |
| 27 | 145 | 7.25 |
| 28 | 150 | 7.5 |
| 29 | 155 | 7.75 |
| 30 | 160 | 8 |
| 31 | 165 | 8.25 |
| 32 | 170 | 8.5 |
| 33 | 175 | 8.75 |
| 34 | 180 | 9 |
| 35 | 185 | 9.25 |
| 36 | 190 | 9.5 |
| 37 | 195 | 9.75 |
| 38 | 200 | 10 |
| 39 | 205 | 10.25 |
| 40 | 210 | 10.5 |
| 41 | 215 | 10.75 |
| 42 | 220 | 11 |
| 43 | 225 | 11.25 |
| 44 | 230 | 11.5 |
| 45 | 235 | 11.75 |
| 46 | 240 | 12 |
| 47 | 245 | 12.25 |
| 48 | 250 | 12.5 |
| 49 | 255 | 12.75 |
| 50 | 260 | 13 |

### Example 37

### High-throughput Screening Assay Identifying Changes in Small Molecule Concentration and Membrane Permeability

[1227] Binding of a ligand to a receptor is known to alter intracellular levels of small molecules, such as calcium, potassium, sodium, and pH, as well as alter membrane potential. These alterations can be measured in an assay to identify supernatants which bind to receptors of a particular cell. Although the following protocol describes an assay for calcium, this protocol can easily be modified to detect changes in potassium, sodium, pH, membrane potential, or any other small molecule which is detectable by a fluorescent probe.

[1228] The following assay uses Fluorometric Imaging Plate Reader (“FLIPR”) to measure changes in fluorescent molecules (Molecular Probes) that bind small molecules. Clearly, any fluorescent molecule detecting a small molecule can be used instead of the calcium fluorescent molecule, fluo-4 (Molecular Probes, Inc.; catalog no. F-14202), used here.

[1229] For adherent cells, seed the cells at 10,000 -20,000 cells/well in a Co-star black 96-well plate with clear bottom. The plate is incubated in a C0₂ incubator for 20 hours. The adherent cells are washed two times in Biotek washer with 200 ul of HBSS (Hank's Balanced Salt Solution) leaving 100 ul of buffer after the final wash.

[1230] A stock solution of 1 mg/ml fluo-4 is made in 10% pluronic acid DMSO. To load the cells with fluo-4, 50 ul of 12 ug/ml fluo-4 is added to each well. The plate is incubated at 37 degrees C in a CO₂ incubator for 60 min. The plate is washed four times in the Biotek washer with HBSS leaving 100 ul of buffer.

[1231] For non-adherent cells, the cells are spun down from culture media. Cells are re-suspended to 2-5×10⁶ cells/ml with HBSS in a 50-ml conical tube. 4 ul of 1 mg/ml fluo-4 solution in 10% pluronic acid DMSO is added to each ml of cell suspension. The tube is then placed in a 37 degrees C water bath for 30-60 min. The cells are washed twice with HBSS, resuspended to 1×10⁶ cells/ml, and dispensed into a microplate, 100 ul/well. The plate is centrifuged at 1000 rpm for 5 min. The plate is then washed once in Denley Cell Wash with 200 ul, followed by an aspiration step to 100 ul final volume.

[1232] For a non-cell based assay, each well contains a fluorescent molecule, such as fluo-4 . The supernatant is added to the well, and a change in fluorescence is detected.

[1233] To measure the fluorescence of intracellular calcium, the FLIPR is set for the following parameters: (1) System gain is 300-800 mW; (2) Exposure time is 0.4 second; (3) Camera F/stop is F/2; (4) Excitation is 488 nm; (5) Emission is 530 nm; and (6) Sample addition is 50 ul. Increased emission at 530 nm indicates an extracellular signaling event caused by the a molecule, either polypeptide of the present invention or a molecule induced by polypeptide of the present invention, which has resulted in an increase in the intracellular Ca⁺⁺ concentration.

### Example 38

### High-throughput Screening Assay Identifying Tyrosine Kinase Activity

[1234] The Protein Tyrosine Kinases (PTK) represent a diverse group of transmembrane and cytoplasmic kinases. Within the Receptor Protein Tyrosine Kinase RPTK) group are receptors for a range of mitogenic and metabolic growth factors including the PDGF, FGF, EGF, NGF, HGF and Insulin receptor subfamilies. In addition there are a large family of RPTKs for which the corresponding ligand is unknown. Ligands for RPTKs include mainly secreted small proteins, but also membrane-bound and extracellular matrix proteins.

[1235] Activation of RPTK by ligands involves ligand-mediated receptor dimerization, resulting in transphosphorylation of the receptor subunits and activation of the cytoplasmic tyrosine kinases. The cytoplasmic tyrosine kinases include receptor associated tyrosine kinases of the src-family (e.g., src, yes, lck, lyn, fyn) and non-receptor linked and cytosolic protein tyrosine kinases, such as the Jak family, members of which mediate signal transduction triggered by the cytokine superfamily of receptors (e.g., the Interleukins, Interferons, GM-CSF, and Leptin).

[1236] Because of the wide range of known factors capable of stimulating tyrosine kinase activity, identifying whether polypeptide of the present invention or a molecule induced by polypeptide of the present invention is capable of activating tyrosine kinase signal transduction pathways is of interest. Therefore, the following protocol is designed to identify such molecules capable of activating the tyrosine kinase signal transduction pathways.

[1237] Seed target cells (e.g., primary keratinocytes) at a density of approximately 25,000 cells per well in a 96 well Loprodyne Silent Screen Plates purchased from Nalge Nunc (Naperville, Ill.). The plates are sterilized with two 30 minute rinses with 100% ethanol, rinsed with water and dried overnight. Some plates are coated for 2 hr with 100 ml of cell culture grade type I collagen (50 mg/ml), gelatin (2%) or polylysine (50 mg/ml), all of which can be purchased from Signa Chemicals (St. Louis, Mo.) or 10% Matrigel purchased from Becton Dickinson (Bedford, Mass.), or calf serum, rinsed with PBS and stored at 4 degree C. Cell growth on these plates is assayed by seeding 5,000 cells/well in growth medium and indirect quantitation of cell number through use of alamarBlue as described by the manufacturer Alamar Biosciences, Inc. (Sacramento, Calif.) after 48 hr. Falcon plate covers #3071 from Becton Dickinson (Bedford, Mass.) are used to cover the Loprodyne Silent Screen Plates. Falcon Microtest III cell culture plates can also be used in some proliferation experiments.

[1238] To prepare extracts, A431 cells are seeded onto the nylon membranes of Loprodyne plates (20,000/200 ml/well) and cultured overnight in complete medium. Cells are quiesced by incubation in serum-free basal medium for 24 hr. After 5-20 minutes treatment with EGF (60 ng/ml) or 50 ul of the supernatant produced in Example 30, the medium was removed and 100 ml of extraction buffer ((20 mM HEPES pH 7.5, 0.15 M NaCl, 1% Triton X-100, 0.1% SDS, 2 mM Na3VO4, 2 mM Na4P2Q7 and a cocktail of protease inhibitors (# 1836170) obtained from Boeheringer Mannheim (Indianapolis, Ind.)) is added to each well and the plate is shaken on a rotating shaker for 5 minutes at 4° C. The plate is then placed in a vacuum transfer manifold and the extract filtered through the 0.45 mm membrane bottoms of each well using house vacuum. Extracts are collected in a 96-well catch/assay plate in the bottom of the vacuum manifold and immediately placed on ice. To obtain extracts clarified by centrifugation, the content of each well, after detergent solubilization for 5 minutes, is removed and centrifuged for 15 minutes at 4 degree C at 16,000× g.

[1239] Test the filtered extracts for levels of tyrosine kinase activity. Although many methods of detecting tyrosine kinase activity are known, one method is described here.

[1240] Generally, the tyrosine kinase activity of a supernatant is evaluated by determining its ability to phosphorylate a tyrosine residue on a specific substrate (a biotinylated peptide). Biotinylated peptides that can be used for this purpose include PSK1 (corresponding to amino acids 6-20 of the cell division kinase cdc2-p34) and PSK2 (corresponding to amino acids 1-17 of gastrin). Both peptides are substrates for a range of tyrosine kinases and are available from Boehringer Mannheim.

[1241] The tyrosine kinase reaction is set up by adding the following components in order. First, add 10 ul of 5 uM Biotinylated Peptide, then 10 ul ATP/Mg₂₊ (5 mM ATP/50 mM MgCl₂), then 10 ul of 5× Assay Buffer (40 mM imidazole hydrochloride, pH7.3, 40 mM beta-glycerophosphate, 1 mM EGTA, 100 mM MgCl₂, 5 mM MnCl₂, 0.5 mg/ml BSA), then 5 ul of Sodium Vanadate (1 mM), and then 5 ul of water. Mix the components gently and preincubate the reaction mix at 30 degree C for 2 min. Initial the reaction by adding 10 ul of the control enzyme or the filtered supernatant.

[1242] The tyrosine kinase assay reaction is then terminated by adding 10 ul of 120 mm EDTA and place the reactions on ice.

[1243] Tyrosine kinase activity is determined by transferring 50 ul aliquot of reaction mixture to a microtiter plate (MTP) module and incubating at 37 degree C for 20 min. This allows the streptavidin coated 96 well plate to associate with the biotinylated peptide. Wash the MTP module with 300 ul/well of PBS four times. Next add 75 ul of anti-phospotyrosine antibody conjugated to horse radish peroxidase(anti-P-Tyr-POD(0.5 u/ml)) to each well and incubate at 37 degree C for one hour. Wash the well as above.

[1244] Next add 100 ul of peroxidase substrate solution (Boehringer Mannheim) and incubate at room temperature for at least 5 mins (up to 30 min). Measure the absorbance of the sample at 405 nm by using ELISA reader. The level of bound peroxidase activity is quantitated using an ELISA reader and reflects the level of tyrosine kinase activity.

### Example 39

### High-Throughput Screening Assay Identifying Phosphorylation Activity

[1245] As a potential alternative and/or complement to the assay of protein tyrosine kinase activity described in Example 38, an assay which detects activation (phosphorylation) of major intracellular signal transduction intermediates can also be used. For example, as described below one particular assay can detect tyrosine phosphorylation of the Erk-1 and Erk-2 kinases. However, phosphorylation of other molecules, such as Raf, JNK, p38 MAP, Map kinase kinase (MEK), MEK kinase, Src, Muscle specific kinase (MuSK), IRAK, Tec, and Janus, as well as any other phosphoserine, phosphotyrosine, or phosphothreonine molecule, can be detected by substituting these molecules for Erk-1 or Erk-2 in the following assay.

[1246] Specifically, assay plates are made by coating the wells of a 96-well ELISA plate with 0.1 ml of protein G (1 ug/ml) for 2 hr at room temp, (RT). The plates are then rinsed with PBS and blocked with 3% BSA/PBS for 1 hr at RT. The protein G plates are then treated with 2 commercial monoclonal antibodies (100 ng/well) against Erk-1 and Erk-2 (1 hr at RT) (Santa Cruz Biotechnology). (To detect other molecules, this step can easily be modified by substituting a monoclonal antibody detecting any of the above described molecules.) After 3-5 rinses with PBS, the plates are stored at 4 degree C until use.

[1247] A431 cells are seeded at 20,000/well in a 96-well Loprodyne filterplate and cultured overnight in growth medium. The cells are then starved for 48 hr in basal medium (DMEM) and then treated with EGF (6 ng/well) or 50 ul of the supernatants obtained in Example 30 for 5-20 minutes. The cells are then solubilized and extracts filtered directly into the assay plate.

[1248] After incubation with the extract for 1 hr at RT, the wells are again rinsed. As a positive control, a commercial preparation of MAP kinase (10 ng/well) is used in place of A43 1 extract. Plates are then treated with a commercial polyclonal (rabbit) antibody (lug/ml) which specifically recognizes the phosphorylated epitope of the Erk-1 and Erk-2 kinases (1 hr at RT). This antibody is biotinylated by standard procedures. The bound polyclonal antibody is then quantitated by successive incubations with Europium-streptavidin and Europium fluorescence enhancing reagent in the Wallac DELFIA instrument (time-resolved fluorescence). An increased fluorescent signal over background indicates a phosphorylation by polypeptide of the present invention or a molecule induced by polypeptide of the present invention.

### Example 40

### Assay for the Stimulation of Bone Marrow CD34+ Cell Proliferation

[1249] This assay is based on the ability of human CD34+ to proliferate in the presence of hematopoietic growth factors and evaluates the ability of isolated polypeptides expressed in mammalian cells to stimulate proliferation of CD34+ cells.

[1250] It has been previously shown that most mature precursors will respond to only a single signal. More immature precursors require at least two signals to respond. Therefore, to test the effect of polypeptides on hematopoietic activity of a wide range of progenitor cells, the assay contains a given polypeptide in the presence or absence of other hematopoietic growth factors. Isolated cells are cultured for 5 days in the presence of Stem Cell Factor (SCF) in combination with tested sample. SCF alone has a very limited effect on the proliferation of bone marrow (BM) cells, acting in such conditions only as a “survival” factor. However, combined with any factor exhibiting stimulatory effect on these cells (e.g., IL-3), SCF will cause a synergistic effect. Therefore, if the tested polypeptide has a stimulatory effect on hematopoietic progenitors, such activity can be easily detected. Since normal BM cells have a low level of cycling cells, it is likely that any inhibitory effect of a given polypeptide, or agonists or antagonists thereof, might not be detected. Accordingly, assays for an inhibitory effect on progenitors is preferably tested in cells that are first subjected to in vitro stimulation with SCF+IL+3, and then contacted with the compound that is being evaluated for inhibition of such induced proliferation.

[1251] Briefly, CD34+ cells are isolated using methods known in the art. The cells are thawed and resuspended in medium (QBSF 60 serum-free medium with 1% L-glutamine (500 ml) Quality Biological, Inc., Gaithersburg, Md. Cat# 160-204-101). After several gentle centrifugation steps at 200× g, cells are allowed to rest for one hour. The cell count is adjusted to 2.5×10⁵ cells/ml. During this time, 100 μl of sterile water is added to the peripheral wells of a 96-well plate. The cytokines that can be tested with a given polypeptide in this assay is rhSCF (R&D Systems, Minneapolis, Minn., Cat# 255-SC) at 50 ng/ml alone and in combination with rhSCF and rhIL-3 (R&D Systems, Minneapolis, MN, Cat# 203-ML) at 30 ng/ml. After one hour, 10 μl of prepared cytokines, 50 μl of the supernatants prepared in Example 30 (supernatants at 1:2 dilution=50 μl) and 20 μl of diluted cells are added to the media which is already present in the wells to allow for a final total volume of 100 μl. The plates are then placed in a 37° C./5% CO₂ incubator for five days.

[1252] Eighteen hours before the assay is harvested, 0.5 μCi/well of [3H] Thymidine is added in a 10 μl volume to each well to determine the proliferation rate. The experiment is terminated by harvesting the cells from each 96-well plate to a filtermat using the Tomtec Harvester 96. After harvesting, the filtermats are dried, trimmed and placed into OmniFilter assemblies consisting of one OmniFilter plate and one OmniFilter Tray. 60 μl Microscint is added to each well and the plate sealed with TopSeal-A press-on sealing film A bar code 15 sticker is affixed to the first plate for counting. The sealed plates are then loaded and the level of radioactivity determined via the Packard Top Count and the printed data collected for analysis. The level of radioactivity reflects the amount of cell proliferation.

[1253] The studies described in this example test the activity of a given polypeptide to stimulate bone marrow CD34+ cell proliferation. One skilled in the art could easily modify the exemplified studies to test the activity of polynucleotides (e.g., gene therapy), antibodies, agonists, and/or antagonists and fragments and variants thereof. As a nonlimiting example, potential antagonists tested in this assay would be expected to inhibit cell proliferation in the presence of cytokines and/or to increase the inhibition of cell proliferation in the presence of cytokines and a given polypeptide. In contrast, potential agonists tested in this assay would be expected to enhance cell proliferation and/or to decrease the inhibition of cell proliferation in the presence of cytokines and a given polypeptide.

[1254] The ability of a gene to stimulate the proliferation of bone marrow CD34+ cells indicates that polynucleotides and polypeptides corresponding to the gene are useful for the diagnosis and treatment of disorders affecting the immune system and hematopoiesis. Representative uses are described in the “Immune Activity” and “Infectious Disease” sections above, and elsewhere herein.

### Example 41

### Assay for Extracellular Matrix Enhanced Cell Response (EMECR)

[1255] The objective of the Extracellular Matrix Enhanced Cell Response (EMECR) assay is to identify gene products (e.g., isolated polypeptides) that act on the hematopoietic stem cells in the context of the extracellular matrix (ECM) induced signal.

[1256] Cells respond to the regulatory factors in the context of signal(s) received from the surrounding microenvironment. For example, fibroblasts, and endothelial and epithelial stem cells fail to replicate in the absence of signals from the ECM. Hematopoietic stem cells can undergo self-renewal in the bone marrow, but not in in vitro suspension culture. The ability of stem cells to undergo self-renewal in vitro is dependent upon their interaction with the stromal cells and the ECM protein fibronectin (fn). Adhesion of cells to fn is mediated by the α₅.β₁ and α₄.β₁ integrin receptors, which are expressed by human and mouse hematopoietic stem cells. The factor(s) which integrate with the ECM environment and are responsible for stimulating stem cell self-renewal havea not yet been identified. Discovery of such factors should be of great interest in gene therapy and bone marrow transplant applications

[1257] Briefly, polystyrene, non tissue culture treated, 96-well plates are coated with fn fragment at a coating concentration of 0.2 μg/cm². Mouse bone marrow cells are plated (1,000 cells/well ) in 0.2 ml of serum-free medium. Cells cultured in the presence of IL-3 (5 ng/ml )+SCF (50 ng/ml ) would serve as the positive control, conditions under which little self-renewal but pronounced differentiation of the stem cells is to be expected. Gene products of the invention (e.g., including, but not limited to, polynucleotides and polypeptides of the present invention, and supernatants produced in Example 30), are tested with appropriate negative controls in the presence and absence of SCF(5.0 ng/ml), where test factor supernatants represent 10% of the total assay volume. The plated cells are then allowed to grow by incubating in a low oxygen environment (5% CO₂, 7% O₂, and 88% N₂ ) tissue culture incubator for 7 days. The number of proliferating cells within the wells is then quantitated by measuring thymidine incorporation into cellular DNA. Verification of the positive hits in the assay will require phenotypic characterization of the cells, which can be accomplished by scaling up of the culture system and using appropriate antibody reagents against cell surface antigens and FACScan.

[1258] One skilled in the art could easily modify the exemplified studies to test the activity of polynucleotides (e.g., gene therapy), antibodies, agonists, and/or antagonists and fragments and variants thereof.

[1259] If a particular polypeptide of the present invention is found to be a stimulator of hematopoietic progenitors, polynucleotides and polypeptides corresponding to the gene encoding said polypeptide may be useful for the diagnosis and treatment of disorders affecting the immune system and hematopoiesis. Representative uses are described in the “Immune Activity” and “Infectious Disease” sections above, and elsewhere herein. The gene product may also be useful in the expansion of stem cells and committed progenitors of various blood lineages, and in the differentiation and/or proliferation of various cell types.

[1260] Additionally, the polynucleotides and/or polypeptides of the gene of interest and/or agonists and/or antagonists thereof, may also be employed to inhibit the proliferation and differentiation of hematopoietic cells and therefore may be employed to protect bone marrow stem cells from chemotherapeutic agents during chemotherapy. This antiproliferative effect may allow administration of higher doses of chemotherapeutic agents and, therefore, more effective chemotherapeutic treatment.

[1261] Moreover, polynucleotides and polypeptides corresponding to the gene of interest may also be useful for the treatment and diagnosis of hematopoietic related disorders such as, for example, anemia, pancytopenia, leukopenia, thrombocytopenia or leukemia since stromal cells are important in the production of cells of hematopoietic lineages. The uses include bone marrow cell ex-vivo culture, bone marrow transplantation, bone marrow reconstitution, radiotherapy or chemotherapy of neoplasia.

### Example 42

### Human Dermal Fibroblast and Aortic Smooth Muscle Cell Proliferation

[1262] The polypeptide of interest is added to cultures of normal human dermal fibroblasts (NHDF) and human aortic smooth muscle cells (AOSMC) and two co-assays are performed with each sample. The first assay examines the effect of the polypeptide of interest on the proliferation of normal human dermal fibroblasts (NHDF) or aortic smooth muscle cells (AoSMC). Aberrant growth of fibroblasts or smooth muscle cells is a part of several pathological processes, including fibrosis, and restenosis. The second assay examines IL6 production by both NHDF and SMC. IL6 production is an indication of functional activation. Activated cells will have increased production of a number of cytokines and other factors, which can result in a proinflammatory or immunomodulatory outcome. Assays are run with and without co-TNFa stimulation, in order to check for costimulatory or inhibitory activity.

[1263] Briefly, on day 1, 96-well black plates are set up with 1000 cells/well (NHDF) or 2000 cells/well (AoSMC) in 100 μl culture media. NHDF culture media contains: Clonetics FB basal media, 1 mg/ml hFGF, 5 mg/ml insulin, 50 mg/ml gentamycin, 2%FBS, while AoSMC culture media contains Clonetics SM basal media, 0.5 μg/ml hEGF, 5 mg/ml insulin, 1 μg/ml hFGF, 50 mg/ml gentamycin, 50 μg/ml Amphotericin B, 5%FBS. After incubation at 37° C. for at least 4-5 hours culture media is aspirated and replaced with growth arrest media. Growth arrest media for NHDF contains fibroblast basal media, 50 mg/ml gentamycin, 2% FBS, while growth arrest media for AoSMC contains SM basal media, 50 mg/ml gentamycin, 50μg/ml Amphotericin B, 0.4% FBS. Incubate at 37° C. until day 2.

[1264] On day 2, serial dilutions and templates of the polypeptide of interest are designed such that they always include media controls and known-protein controls. For both stimulation and inhibition experiments, proteins are diluted in growth arrest media. For inhibition experiments, TNFa is added to a final concentration of 2 ng/ml (NHDF) or 5 ng/ml (AoSMC). Add ⅓ vol media containing controls or polypeptides of the present invention and incubate at 37 degrees C/5% CO₂ until day 5.

[1265] Transfer 60 μl from each well to another labeled 96-well plate, cover with a plate-sealer, and store at 4 degrees C until Day 6 (for IL6 ELISA). To the remaining 100 μl in the cell culture plate, aseptically add Alamar Blue in an amount equal to 10% of the culture volume (10μl). Return plates to incubator for 3 to 4 hours. Then measure fluorescence with excitation at 530 nm and emission at 590 nm using the CytoFluor. This yields the growth stimulation/inhibition data.

[1266] On day 5, the IL6 ELISA is performed by coating a 96 well plate with 50-100 ul/well of Anti-Human IL6 Monoclonal antibody diluted in PBS, pH 7.4, incubate ON at room temperature.

[1267] On day 6, empty the plates into the sink and blot on paper towels. Prepare Assay Buffer containing PBS with 4% BSA. Block the plates with 200 μl/well of Pierce Super Block blocking buffer in PBS for 1-2 hr and then wash plates with wash buffer (PBS, 0.05% Tween-20). Blot plates on paper towels. Then add 50 μl/well of diluted Anti-Human IL-6 Monoclonal, Biotin-labeled antibody at 0.50 mg/ml. Make dilutions of IL-6 stock in media (30, 10, 3, 1, 0.3, 0 ng/ml). Add duplicate samples to top row of plate. Cover the plates and incubate for 2 hours at RT on shaker.

[1268] Plates are washed with wash buffer and blotted on paper towels. Dilute EU-labeled Streptavidin 1:1000 in Assay buffer, and add 100 μl/well. Cover the plate and incubate 1 h at RT. Plates are again washed with wash buffer and blotted on paper towels.

[1269] Add 100 μl/well of Enhancement Solution. Shake for 5 minutes. Read the plate on the Wallac DELFIA Fluorometer. Readings from triplicate samples in each assay were tabulated and averaged.

[1270] A positive result in this assay suggests AoSMC cell proliferation and that the polypeptide of the present invention may be involved in dermal fibroblast proliferation and/or smooth muscle cell proliferation. A positive result also suggests many potential uses of polypeptides, polynucleotides, agonists and/or antagonists of the polynucleotide/polypeptide of the present invention which gives a positive result. For example, inflammation and immune responses, wound healing, and angiogenesis, as detailed throughout this specification. Particularly, polypeptides of the present invention and polynucleotides of the present invention may be used in wound healing and dermal regeneration, as well as the promotion of vasculogenesis, both of the blood vessels and lymphatics. The growth of vessels can be used in the treatment of, for example, cardiovascular diseases. Additionally, antagonists of polypeptides and polynucleotides of the invention may be useful in treating diseases, disorders, and/or conditions which involve angiogenesis by acting as an anti-vascular agent (e.g., anti-angiogenesis). These diseases, disorders, and/or conditions are known in the art and/or are described herein, such as, for example, malignancies, solid tumors, benign tumors, for example hemangiomas, acoustic neuromas, neurofibromas, trachomas, and pyogenic granulomas; artheroscleric plaques; ocular angiogenic diseases, for example, diabetic retinopathy, retinopathy of prematurity, macular degeneration, corneal graft rejection, neovascular glaucoma, retrolental fibroplasia, rubeosis, retinoblastoma, uvietis and Pterygia (abnormal blood vessel growth) of the eye; rheumatoid arthritis; psoriasis; delayed wound healing; endometriosis; vasculogenesis; granulations; hypertrophic scars (keloids); nonunion fractures; scleroderma; trachoma; vascular adhesions; myocardial angiogenesis; coronary collaterals; cerebral collaterals; arteriovenous malformations; ischemic limb angiogenesis; Osler-Webber Syndrome; plaque neovascularization; telangiectasia; hemophiliac joints; angiofibroma; fibromuscular dysplasia; wound granulation; Crohn's disease; and atherosclerosis. Moreover, antagonists of polypeptides and polynucleotides of the invention may be useful in treating anti-hyperproliferative diseases and/or anti-inflammatory known in the art and/or described herein.

[1271] One skilled in the art could easily modify the exemplified studies to test the activity of polynucleotides (e.g., gene therapy), antibodies, agonists, and/or antagonists and fragments and variants thereof.

### Example 43

### Cellular Adhesion Molecule (CAM) Expression on Endothelial Cells

[1272] The recruitment of lymphocytes to areas of inflammation and angiogenesis involves specific receptor-ligand interactions between cell surface adhesion molecules (CAMs) on lymphocytes and the vascular endothelium. The adhesion process, in both normal and pathological settings, follows a multi-step cascade that involves intercellular adhesion molecule-1 (ICAM-1), vascular cell adhesion molecule-1 (VCAM-1), and endothelial leukocyte adhesion molecule-1 (E-selectin) expression on endothelial cells (EC). The expression of these molecules and others on the vascular endothelium determines the efficiency with which leukocytes may adhere to the local vasculature and extravasate into the local tissue during the development of an inflammatory response. The local concentration of cytokines and growth factor participate in the modulation of the expression of these CAMs.

[1273] Briefly, endothelial cells (e.g., Human Umbilical Vein Endothelial cells (HUVECs)) are grown in a standard 96 well plate to confluence, growth medium is removed from the cells and replaced with 100 μl of 199 Medium (10% fetal bovine serum (FBS)). Samples for testing and positive or negative controls are added to the plate in triplicate (in 10 μl volumes). Plates are then incubated at 37° C. for either 5 h (selectin and integrin expression) or 24 h (integrin expression only). Plates are aspirated to remove medium and 100 μl of 0.1% paraformaldehyde-PBS(with Ca++ and Mg++) is added to each well. Plates are held at 4° C. for 30 min. Fixative is removed from the wells and wells are washed IX with PBS(+Ca,Mg) +0.5% BSA and drained. 10 μl of diluted primary antibody is added to the test and control wells. Anti-ICAM-1-Biotin, Anti-VCAM-1-Biotin and Anti-E-selectin-Biotin are used at a concentration of 10 μg/ml (1:10 dilution of 0.1 mg/ml stock antibody). Cells are incubated at 37° C. for 30 min. in a humidified environment. Wells are washed three times with PBS(+Ca,Mg) +0.5% BSA. 20 μl of diluted ExtrAvidin-Alkaline Phosphatase (1:5,000 dilution, referred to herein as the working dilution) are added to each well and incubated at 37° C. for 30 min. Wells are washed three times with PBS(+Ca,Mg)+0.5% BSA. Dissolve 1 tablet of p-Nitrophenol Phosphate pNPP per 5 ml of glycine buffer (pH 10.4). 100 μl of pNPP substrate in glycine buffer is added to each test well. Standard wells in triplicate are prepared from the working dilution of the ExtrAvidin-Alkaline Phosphotase in glycine buffer: 1:5,000 (100)>10^{-0.5}>10⁻¹>10^{-1.5}0.5 μl of each dilution is added to triplicate wells and the resulting AP content in each well is 5.50 ng, 1.74 ng, 0.55 ng, 0.18 ng. 100 μl of pNNP reagent is then added to each of the standard wells. The plate is incubated at 37° C. for 4 h. A volume of 50 μl of 3M NaOH is added to all wells. The plate is read on a plate reader at 405 nm using the background subtraction option on blank wells filled with glycine buffer only. Additionally, the template is set up to indicate the concentration of AP-conjugate in each standard well [5.50 ng; 1.74 ng; 0.55 ng; 0.18 ng]. Results are indicated as amount of bound AP-conjugate in each sample.

### Example 44

### Alamar Blue Endothelial Cells Proliferation Assay

[1274] This assay may be used to quantitatively determine protein mediated inhibition of bFGF-induced proliferation of Bovine Lymphatic Endothelial Cells (LECs), Bovine Aortic Endothelial Cells (BAECs) or Human Microvascular Uterine Myometrial Cells (UTMECs). This assay incorporates a fluorometric growth indicator based on detection of metabolic activity. A standard Alamar Blue Proliferation Assay is prepared in EGM-2MV with 10 ng/ml of bFGF added as a source of endothelial cell stimulation. This assay may be used with a variety of endothelial cells with slight changes in growth medium and cell concentration. Dilutions of the protein batches to be tested are diluted as appropriate. Serum-free medium (GIBCO SFM) without bFGF is used as a non-stimulated control and Angiostatin or TSP-1 are included as a known inhibitory controls.

[1275] Briefly, LEC, BAECs or UTMECs are seeded in growth media at a density of 5000 to 2000 cells/well in a 96 well plate and placed at 37 degreesC overnight. After the overnight incubation of the cells, the growth media is removed and replaced with GIBCO EC-SFM. The cells are treated with the appropriate dilutions of the protein of interest or control protein sample(s) (prepared in SFM ) in triplicate wells with additional bFGF to a concentration of 10 ng/ ml. Once the cells have been treated with the samples, the plate(s) is/are placed back in the 37° C. incubator for three days. After three days 10 ml of stock alamar blue (Biosource Cat# DAL1100) is added to each well and the plate(s) is/are placed back in the 37° C. incubator for four hours. The plate(s) are then read at 530 nm excitation and 590 nm emission using the CytoFluor fluorescence reader. Direct output is recorded in relative fluorescence units.

[1276] Alamar blue is an oxidation-reduction indicator that both fluoresces and changes color in response to chemical reduction of growth medium resulting from cell growth. As cells grow in culture, innate metabolic activity results in a chemical reduction of the immediate surrounding environment. Reduction related to growth causes the indicator to change from oxidized (non-fluorescent blue) form to reduced (fluorescent red) form (i.e., stimulated proliferation will produce a stronger signal and inhibited proliferation will produce a weaker signal and the total signal is proportional to the total number of cells as well as their metabolic activity). The background level of activity is observed with the starvation medium alone. This is compared to the output observed from the positive control samples (bFGF in growth medium) and protein dilutions.

### Example 45

### Detection of Inhibition of a Mixed Lymphocyte Reaction

[1277] This assay can be used to detect and evaluate inhibition of a Mixed Lymphocyte Reaction (MLR) by gene products (e.g., isolated polypeptides). Inhibition of a MLR may be due to a direct effect on cell proliferation and viability, modulation of costimulatory molecules on interacting cells, modulation of adhesiveness between lymphocytes and accessory cells, or modulation of cytokine production by accessory cells. Multiple cells may be targeted by these polypeptides since the peripheral blood mononuclear fraction used in this assay includes T, B and natural killer lymphocytes, as well as monocytes and dendritic cells.

[1278] Polypeptides of interest found to inhibit the MLR may find application in diseases associated with lymphocyte and monocyte activation or proliferation. These include, but are not limited to, diseases such as asthma, arthritis, diabetes, inflammatory skin conditions, psoriasis, eczema, systemic lupus erythematosus, multiple sclerosis, glomerulonephritis, inflammatory bowel disease, crohn's disease, ulcerative colitis, arteriosclerosis, cirrhosis, graft vs. host disease, host vs. graft disease, hepatitis, leukemia and lymphoma.

[1279] Briefly, PBMCs from human donors are purified by density gradient centrifugation using Lymphocyte Separation Medium (LSMO, density 1.0770 g/ml, Organon Teknika Corporation, West Chester, Pa.). PBMCs from two donors are adjusted to 2×10⁶ cells/ml in RPMI-1640 (Life Technologies, Grand Island, N.Y.) supplemented with 10% FCS and 2 mM glutamine. PBMCs from a third donor is adjusted to 2×10⁵ cells/ml. Fifty microliters of PBMCs from each donor is added to wells of a 96-well round bottom microtiter plate. Dilutions of test materials (50 μl) is added in triplicate to microtiter wells. Test samples (of the protein of interest) are added for final dilution of 1:4; rhuIL-2 (R&D Systems, Minneapolis, Minn., catalog number 202-IL) is added to a final concentration of 1 μg/ml; anti-CD4 mAb (R&D Systems, clone 34930.11, catalog number MAB379) is added to a final concentration of 10 μg/ml. Cells are cultured for 7-8 days at 37° C. in 5% CO₂, and 1 μC of [3H] thymidine is added to wells for the last 16 hrs of culture. Cells are harvested and thymidine incorporation determined using a Packard TopCount. Data is expressed as the mean and standard deviation of triplicate determinations.

[1280] Samples of the protein of interest are screened in separate experiments and compared to the negative control treatment, anti-CD4 mAb, which inhibits proliferation of lymphocytes and the positive control treatment, IL-2 (either as recombinant material or supernatant), which enhances proliferation of lymphocytes.

[1281] One skilled in the art could easily modify the exemplified studies to test the activity of polynucleotides (e.g., gene therapy), antibodies, agonists, and/or antagonists and fragments and variants thereof.

### Example 46

### Assays for Protease Activity

[1282] The following assay may be used to assess protease activity of the polypeptides of the invention.

[1283] Gelatin and casein zymography are performed essentially as described (Heusen et al., Anal. Biochem., 102:196-202 (1980); Wilson et al., Journal of Urology, 149:653-658 (1993)). Samples are run on 10% polyacryamide/0.1% SDS gels containing 1% gelain orcasein, soaked in 2.5% triton at room temperature for 1 hour, and in 0.1M glycine, pH 8.3 at 37° C. 5 to 16 hours. After staining in amido black areas of proteolysis apear as clear areas agains the blue-black background. Trypsin (Sigma T8642) is used as a positive control.

[1284] Protease activity is also determined by monitoring the cleavage of n-a-benzoyl-L-arginine ethyl ester (BAEE) (Sigma B-4500. Reactions are set up in (25 mMNaPO₄, 1 mM EDTA, and 1 mM BAEE), pH 7.5. Samples are added and the change in adsorbance at 260 nm is monitored on the Beckman DU-6 spectrophotometer in the time-drive mode. Trypsin is used as a positive control.

[1285] Additional assays based upon the release of acid-soluble peptides from casein or hemoglobin measured as adsorbance at 280 nm or colorimetrically using the Folin method are performed as described in Bergmeyer, et al., Methods of Enzymatic Analysis, 5 (1984). Other assays involve the solubilization of chromogenic substrates (Ward, Applied Science, 251-317 (1983)).

### Example 47

### Identifying Serine Protease Substrate Specificity

[1286] Methods known in the art or described herein may be used to determine the substrate specificity of the polypeptides of the present invention having serine protease activity. A preferred method of determining substrate specificity is by the use of positional scanning synthetic combinatorial libraries as described in GB 2 324 529 (incorporated herein in its entirety).

### Example 48

### Ligand Binding Assays

[1287] The following assay may be used to assess ligand binding activity of the polypeptides of the invention.

[1288] Ligand binding assays provide a direct method for ascertaining receptor pharmacology and are adaptable to a high throughput format. The purified ligand for a polypeptide is radiolabeled to high specific activity (50-2000 Ci/mmol) for binding studies. A determination is then made that the process of radiolabeling does not diminish the activity of the ligand towards its polypeptide. Assay conditions for buffers, ions, pH and other modulators such as nucleotides are optimized to establish a workable signal to noise ratio for both membrane and whole cell polypeptide sources. For these assays, specific polypeptide binding is defined as total associated radioactivity minus the radioactivity measured in the presence of an excess of unlabeled competing ligand. Where possible, more than one competing ligand is used to define residual nonspecific binding.

### Example 49

### Functional Assay in Xenopus Oocytes

[1289] Capped RNA transcripts from linearized plasmid templates encoding the polypeptides of the invention are synthesized in vitro with RNA polymerases in accordance with standard procedures. In vitro transcripts are suspended in water at a final concentration of 0.2 mg/mi. Ovarian lobes are removed from adult female toads, Stage V defolliculated oocytes are obtained, and RNA transcripts (10 ng/oocytc) are injected in a 50 nl bolus using a microinjection apparatus. Two electrode voltage clamps are used to measure the currents from individual Xenopus oocytes in response polypeptides and polypeptide agonist exposure. Recordings are made in Ca2+ free Barth's medium at room temperature. The Xenopus system can be used to screen known ligands and tissue/cell extracts for activating ligands.

### Example 50

### Microphysiometric Assays

[1290] Activation of a wide variety of secondary messenger systems results in extrusion of small amounts of acid from a cell. The acid formed is largely as a result of the increased metabolic activity required to fuel the intracellular signaling process. The pH changes in the media surrounding the cell are very small but are detectable by the CYTOSENSOR microphysiometer (Molecular Devices Ltd., Menlo Park, Calif.). The CYTOSENSOR is thus capable of detecting the activation of polypeptide which is coupled to an energy utilizing intracellular signaling pathway.

### Example 51

### Extract/Cell Supernatant Screening

[1291] A large number of mammalian receptors exist for which there remains, as yet, no cognate activating ligand (agonist). Thus, active ligands for these receptors may not be included within the ligands banks as identified to date. Accordingly, the polypeptides of the invention can also be functionally screened (using calcium, cAMP, microphysiometer, oocyte electrophysiology, etc., functional screens) against tissue extracts to identify its natural ligands. Extracts that produce positive functional responses can be sequentially subfractionated until an activating ligand is isolated and identified.

### Example 52

### Calcium and cAMP Functional Assays

[1292] Seven transmembrane receptors which are expressed in HEK 293 cells have been shown to be coupled functionally to activation of PLC and calcium mobilization and/or cAMP stimulation or inhibition. Basal calcium levels in the HEK 293 cells in receptor-transfected or vector control cells were observed to be in the normal, 100 nM to 200 nM, range. HEK 293 cells expressing recombinant receptors are loaded with fura 2 and in a single day >150 selected ligands or tissue/cell extracts are evaluated for agonist induced calcium mobilization. Similarly, HEK 293 cells expressing recombinant receptors are evaluated for the stimulation or inhibition of cAMP production using standard cAMP quantitation assays. Agonists presenting a calcium transient or cAMP fluctuation are tested in vector control cells to determine if the response is unique to the transfected cells expressing receptor.

### Example 53

### ATP-binding Assay

[1293] The following assay may be used to assess ATP-binding activity of polypeptides of the invention.

[1294] ATP-binding activity of the polypeptides of the invention may be detected using the ATP-binding assay described in U.S. Pat. No. 5,858,719, which is herein incorporated by reference in its entirety. Briefly, ATP-binding to polypeptides of the invention is measured via photoaffinity labeling with 8-azido-ATP in a competition assay. Reaction mixtures containing 1 mg/ml of the ABC transport protein of the present invention are incubated with varying concentrations of ATP, or the non-hydrolyzable ATP analog adenyl-5′-imidodiphosphate for 10 minutes at 4° C. A mixture of 8-azido-ATP (Sigma Chem. Corp., St. Louis, Mo.) plus 8-azido-ATP (³²P-ATP) (5 mCi/μmol, ICN, Irvine Calif.) is added to a final concentration of 100 μM and 0.5 ml aliquots are placed in the wells of a porcelain spot plate on ice. The plate is irradiated using a short wave 254 nm UV lamp at a distance of 2.5 cm from the plate for two one-minute intervals with a one-minute cooling interval in between. The reaction is stopped by addition of dithiothreitol to a final concentration of 2 mM. The incubations are subjected to SDS-PAGE electrophoresis, dried, and autoradiographed. Protein bands corresponding to the particular polypeptides of the invention are excised, and the radioactivity quantified. A decrease in radioactivity with increasing ATP or adenly-5′-imidodiphosphate provides a measure of ATP affinity to the polypeptides.

### Example 54

### Small Molecule Screening

[1295] This invention is particularly useful for screening therapeutic compounds by using the polypeptides of the invention, or binding fragments thereof, in any of a variety of drug screening techniques. The polypeptide or fragment employed in such a test may be affixed to a solid support, expressed on a cell surface, free in solution, or located intracellularly. One method of drug screening utilizes eukaryotic or prokaryotic host cells which are stably transformed with recombinant nucleic acids expressing the polypeptide or fragment. Drugs are screened against such transformed cells in competitive binding assays. One may measure, for example, the formulation of complexes between the agent being tested and polypeptide of the invention.

[1296] Thus, the present invention provides methods of screening for drugs or any other agents which affect activities mediated by the polypeptides of the invention. These methods comprise contacting such an agent with a polypeptide of the invention or fragment thereof and assaying for the presence of a complex between the agent and the polypeptide or fragment thereof, by methods well known in the art. In such a competitive binding assay, the agents to screen are typically labeled. Following incubation, free agent is separated from that present in bound form, and the amount of free or uncomplexed label is a measure of the ability of a particular agent to bind to the polypeptides of the invention.

[1297] Another technique for drug screening provides high throughput screening for compounds having suitable binding affinity to the polypeptides of the invention, and is described in great detail in European Patent Application 84/03564, published on Sep. 13, 1984, which is herein incorporated by reference in its entirety. Briefly stated, large numbers of different small molecule test compounds are synthesized on a solid substrate, such as plastic pins or some other surface. The test compounds are reacted with polypeptides of the invention and washed. Bound polypeptides are then detected by methods well known in the art. Purified polypeptides are coated directly onto plates for use in the aforementioned drug screening techniques. In addition, non-neutralizing antibodies may be used to capture the peptide and immobilize it on the solid support.

[1298] This invention also contemplates the use of competitive drug screening assays in which neutralizing antibodies capable of binding polypeptides of the invention specifically compete with a test compound for binding to the polypeptides or fragments thereof. In this manner, the antibodies are used to detect the presence of any peptide which shares one or more antigenic epitopes with a polypeptide of the invention.

### Example 55

### Phosphorylation Assay

[1299] In order to assay for phosphorylation activity of the polypeptides of the invention, a phosphorylation assay as described in U.S. Pat. No. 5,958,405 (which is herein incorporated by reference) is utilized. Briefly, phosphorylation activity may be measured by phosphorylation of a protein substrate using gamma-labeled ³²P-ATP and quantitation of the incorporated radioactivity using a gamma radioisotope counter. The polypeptides of the invention are incubated with the protein substrate, ³²P-ATP, and a kinase buffer. The ³²P incorporated into the substrate is then separated from free ³²P-ATP by electrophoresis, and the incorporated ³²P is counted and compared to a negative control. Radioactivity counts above the negative control are indicative of phosphorylation activity of the polypeptides of the invention.

### Example 56

### Detection of Phosphorylation Activity (Activation) of the Polypeptides of the Invention in the Presence of Polypeptide Ligands

[1300] Methods known in the art or described herein may be used to determine the phosphorylation activity of the polypeptides of the invention. A preferred method of determining phosphorylation activity is by the use of the tyrosine phosphorylation assay as described in U.S. Pat. No. 5,817,471 (incorporated herein by reference).

### Example 57

### Identification of Signal Transduction Proteins That Interact with Polypeptides of the Present Invention

[1301] The purified polypeptides of the invention are research tools for the identification, characterization and purification of additional signal transduction pathway proteins or receptor proteins. Briefly, labeled polypeptides of the invention are useful as reagents for the purification of molecules with which it interacts. In one embodiment of affinity purification, polypeptides of the invention are covalently coupled to a chromatography column. Cell-free extract derived from putative target cells, such as carcinoma tissues, is passed over the column, and molecules with appropriate affinity bind to the polypeptides of the invention. The protein complex is recovered from the column, dissociated, and the recovered molecule subjected to N-terminal protein sequencing. This amino acid sequence is then used to identify the captured molecule or to design degenerate oligonucleotide probes for cloning the relevant gene from an appropriate cDNA library.

### Example 58

### IL-6 Bioassay

[1302] To test the proliferative effects of the polypeptides of the invention, the IL-6 Bioassay as described by Marz et al. is utilized (Proc. Natl. Acad. Sci., U.S.A., 95:3251-56 (1998), which is herein incorporated by reference). Briefly, IL-6 dependent B9 murine cells are washed three times in IL-6 free medium and plated at a concentration of 5,000 cells per well in 50 μl, and 50 μl of the IL-6-like polypeptide is added. After 68 hrs. at 37° C., the number of viable cells is measured by adding the tetrazolium salt thiazolyl blue (MTT) and incubating for a further 4 hrs. at 37° C. B9 cells are lysed by SDS and optical density is measured at 570 nm. Controls containing IL-6 (positive) and no cytokine (negative) are utilized. Enhanced proliferation in the test sample(s) relative to the negative control is indicative of proliferative effects mediated by polypeptides of the invention.

### Example 59

### Support of Chicken Embryo Neuron Survival

[1303] To test whether sympathetic neuronal cell viability is supported by polypeptides of the invention, the chicken embryo neuronal survival assay of Senaldi et al is utilized (Proc. Natl. Acad. Sci., U.S.A., 96:11458-63 (1998), which is herein incorporated by reference). Briefly, motor and sympathetic neurons are isolated from chicken embryos, resuspended in L15 medium (with 10% FCS, glucose, sodium selenite, progesterone, conalbumin, putrescine, and insulin; Life Technologies, Rockville, Md.) and Dulbecco's modified Eagles medium [with 10% FCS, glutamine, penicillin, and 25 mM Hepes buffer (pH 7.2); Life Technologies, Rockville, Md.], respectively, and incubated at 37° C. in 5% CO₂ in the presence of different concentrations of the purified IL-6-like polypeptide, as well as a negative control lacking any cytokine. After 3 days, neuron survival is determined by evaluation of cellular morphology, and through the use of the colorimetric assay of Mosmann (Mosmann, T., J. Immunol. Methods, 65:55-63 (1983)). Enhanced neuronal cell viability as compared to the controls lacking cytokine is indicative of the ability of the inventive purified IL-6-like polypeptide(s) to enhance the survival of neuronal cells.

### Example 60

### Assay for Phosphatase Activity

[1304] The following assay may be used to assess serine/threonine phosphatase (PTPase) activity of the polypeptides of the invention.

[1305] In order to assay for serine/threonine phosphatase (PTPase) activity, assays can be utilized which are widely known to those skilled in the art. For example, the serine/threonine phosphatase (PSPase) activity is measured using a PSPase assay kit from New England Biolabs, Inc. Myelin basic protein (MyBP), a substrate for PSPase, is phosphorylated on serine and threonine residues with cAMP-dependent Protein Kinase in the presence of [³²P]ATP. Protein serine/threonine phosphatase activity is then determined by measuring the release of inorganic phosphate from 32P-labeled MyBP.

### Example 61

### Interaction of Serine/Threonine Phosphatases with other Proteins

[1306] The polypeptides of the invention with serine/threonine phosphatase activity as determined in Example 60 are research tools for the identification, characterization and purification of additional interacting proteins or receptor proteins, or other signal transduction pathway proteins. Briefly, labeled polypeptide(s) of the invention is useful as a reagent for the purification of molecules with which it interacts. In one embodiment of affinity purification, polypeptide of the invention is covalently coupled to a chromatography column. Cell-free extract derived from putative target cells, such as neural or liver cells, is passed over the column, and molecules with appropriate affinity bind to the polypeptides of the invention. The polypeptides of the invention—complex is recovered from the column, dissociated, and the recovered molecule subjected to N-terminal protein sequencing. This amino acid sequence is then used to identify the captured molecule or to design degenerate oligonucleotide probes for cloning the relevant gene from an appropriate cDNA library.

### Example 62

### Assaying for Heparanase Activity

[1307] In order to assay for heparanase activity of the polypeptides of the invention, the heparanase assay described by Vlodavsky et al is utilized (Vlodavsky, I., et al., Nat. Med., 5:793-802 (1999)). Briefly, cell lysates, conditioned media or intact cells (1×10⁶ cells per 35-mm dish) are incubated for 18 hrs at 37° C., pH 6.2-6.6, with ³⁵S-labeled ECM or soluble ECM derived peak I proteoglycans. The incubation medium is centrifuged and the supernatant is analyzed by gel filtration on a Sepharose CL-6B column (0.9×30 cm). Fractions are eluted with PBS and their radioactivity is measured. Degradation fragments of heparan sulfate side chains are eluted from Sepharose 6B at 0.5<Kₐᵥ<0.8 (peak II). Each experiment is done at least three times. Degradation fragments corresponding to “peak II,” as described by Vlodavsky et al., is indicative of the activity of the polypeptides of the invention in cleaving heparan sulfate.

### Example 63

### Immobilization of Biomolecules

[1308] This example provides a method for the stabilization of polypeptides of the invention in non-host cell lipid bilayer constucts (see, e.g., Bieri et al., Nature Biotech 17:1105-1108 (1999), hereby incorporated by reference in its entirety herein) which can be adapted for the study of polypeptides of the invention in the various functional assays described above. Briefly, carbohydrate-specific chemistry for biotinylation is used to confine a biotin tag to the extracellular domain of the polypeptides of the invention, thus allowing uniform orientation upon immobilization. A 50 uM solution of polypeptides of the invention in washed membranes is incubated with 20 mM NaIO4 and 1.5 mg/ml (4 mM) BACH or 2 mg/ml (7.5 mM) biotin-hydrazide for 1 hr at room temperature (reaction volume, 150 ul). Then the sample is dialyzed (Pierce Slidealizer Cassett, 10 kDa cutoff; Pierce Chemical Co., Rockford Ill.) at 4C first for 5 h, exchanging the buffer after each hour, and finally for 12 h against 500 ml buffer R (0.15 M NaCl, 1 mM MgCl2, 10 mM sodium phosphate, pH7). Just before addition into a cuvette, the sample is diluted 1:5 in buffer ROG50 (Buffer R supplemented with 50 mM octylglucoside).

### Example 64

### TAQMAN

[1309] Quantitative PCR (QPCR). Total RNA from cells in culture are extracted by Trizol separation as recommended by the supplier (LifeTechnologies). (Total RNA is treated with DNase I (Life Technologies) to remove any contaminating genomic DNA before reverse transcription.) Total RNA (50 ng) is used in a one-step, 50 ul, RT-QPCR, consisting of Taqman Buffer A (Perkin-Elmer; 50 mM KCl/10 mM Tris, pH 8.3), 5.5 mM MgCl₂, 240 μM each dNTP, 0.4 units RNase inhibitor(Promega), 8% glycerol, 0.012% Tween-20, 0.05% gelatin, 0.3 uM primers, 0.1 uM probe, 0.025 units Amplitaq Gold (Perkin-Elmer) and 2.5 units Superscript II reverse transcriptase (Life Technologies). As a control for genomic contamination, parallel reactions are setup without reverse transcriptase. The relative abundance of (unknown) and 18S RNAs are assessed by using the Applied Biosystems Prism 7700 Sequence Detection System (Livak, K. J., Flood, S. J., Marmaro, J., Giusti, W. & Deetz, K. (1995) PCR Methods Appl. 4, 357-362). Reactions are carried out at 48° C. for 30 min, 95° C. for 10 min, followed by 40 cycles of 95° C. for 15 s, 60° C. for 1 min. Reactions are performed in triplicate.

[1310] Primers (f & r) and FRET probes sets are designed using Primer Express Software (Perkin-Elmer). Probes are labeled at the 5′-end with the reporter dye 6-FAM and on the 3′-end with the quencher dye TAMRA (Biosource International, Camarillo, Calif. or Perkin-Elmer).

### Example 65

### Assays for Metalloproteinase Activity

[1311] Metalloproteinases (EC 3.4.24.-) are peptide hydrolases which use metal ions, such as Zn²⁺, as the catalytic mechanism. Metalloproteinase activity of polypeptides of the present invention can be assayed according to the following methods.

[1312] Proteolysis of Alpha-2-macroglobulin

[1313] To confirm protease activity, purified polypeptides of the invention are mixed with the substrate alpha-2-macroglobulin (0.2 unit/ml; Boehringer Manrnheim, Germany) in 1× assay buffer (50 mM HEPES, pH 7.5, 0.2 M NaCl, 10 mM CaCl₂, 25 μM ZnCl₂ and 0.05% Brij-35) and incubated at 37° C. for 1-5 days. Trypsin is used as positive control. Negative controls contain only alpha-2-macroglobulin in assay buffer. The samples are collected and boiled in SDS-PAGE sample buffer containing 5% 2-mercaptoethanol for 5-min, then loaded onto 8% SDS-polyacrylamide gel. After electrophoresis the proteins are visualized by silver staining. Proteolysis is evident by the appearance of lower molecular weight bands as compared to the negative control.

[1314] Inhibition of Alpha-2-macroglobulin Proteolysis by Inhibitors of Metalloproteinases

[1315] Known metalloproteinase inhibitors (metal chelators (EDTA, EGTA, AND HgCl₂), peptide metalloproteinase inhibitors (TIMP-1 and TIMP-2), and commercial small molecule MMP inhibitors) are used to characterize the proteolytic activity of polypeptides of the invention. The three synthetic MMP inhibitors used are: MMP inhibitor I, [IC₅₀=1.0 μM against MMP-1 and MMP-8; IC₅₀=30 μM against MMP-9; IC₅₀=150 μM against MMP-3]; MMP-3 (stromelysin-1) inhibitor I [IC₅₀=5 μM against MMP-3], and MMP-3 inhibitor II [K₁=130 nM against MMP-3]; inhibitors available through Calbiochem, catalog # 444250, 444218, and 444225, respectively). Briefly, different concentrations of the small molecule MMP inhibitors are mixed with purified polypeptides of the invention (50μg/ml) in 22.9 μl of 1× HEPES buffer (50 mM HEPES, pH 7.5, 0.2 M NaCl, 10 mM CaCl₂, 25 μM ZnCl₂ and 0.05% Brij-35) and incubated at room temperature (24° C.) for 2-hr, then 7.1 μl of substrate alpha-2-macroglobulin (0.2 unit/ml) is added and incubated at 37° C. for 20-hr. The reactions are stopped by adding 4× sample buffer and boiled immediately for 5 minutes. After SDS-PAGE, the protein bands are visualized by silver stain.

[1316] Synthetic Fluorogenic Peptide Substrates Cleavage Assay

[1317] The substrate specificity for polypeptides of the invention with demonstrated metalloproteinase activity can be determined using synthetic fluorogenic peptide substrates (purchased from BACHEM Bioscience Inc). Test substrates include, M-1985, M-2225, M-2105, M-21 10, and M-2255. The first four are MMP substrates and the last one is a substrate of tumor necrosis factor-α (TNF-α) converting enzyme (TACE). All the substrates are prepared in 1:1 dimethyl sulfoxide (DMSO) and water. The stock solutions are 50-500 μM. Fluorescent assays are performed by using a Perkin Elmer LS 50B luminescence spectrometer equipped with a constant temperature water bath. The excitation λ is 328 nm and the emission λ is 393 mn. Briefly, the assay is carried out by incubating 176 μl 1× HEPES buffer (0.2 M NaCl, 10 mM CaCl₂, 0.05% Brij-35 and 50 mM HEPES, pH 7.5) with 4 μl of substrate solution (50 μM) at 25° C. for 15 minutes, and then adding 20 μl of a purified polypeptide of the invention into the assay cuvett. The final concentration of substrate is 1 μM. Initial hydrolysis rates are monitored for 30-min.

### Example 66

### Characterization of the cDNA Contained in a Deposited Plasmid

[1318] The size of the cDNA insert contained in a deposited plasmid may be routinely determined using techniques known in the art, such as PCR amplification using synthetic primers hybridizable to the 3′ and 5′ ends of the cDNA sequence. For example, two primers of 17-30 nucleotides derived from each end of the cDNA (i.e., hybridizable to the absolute 5′ nucleotide or the 3′ nucleotide end of the sequence of SEQ ID NO:X, respectively) are synthesized and used to amplify the cDNA using the deposited cDNA plasmid as a template. The polymerase chain reaction is carried out under routine conditions, for instance, in 25 μl of reaction mixture with 0.5 ug of the above cDNA template. A convenient reaction mixture is 1.5-5 mM MgCl₂, 0.01% (w/v) gelatin, 20 uM each of dATP, dCTP, dGTP, dTTP, 25 pmol of each primer and 0.25 Unit of Taq polymerase. Thirty five cycles of PCR (denaturation at 94 degree C for 1 min; annealing at 55 degree C for 1 min; elongation at 72 degree C for 1 min) are performed with a Perkin-Elmer Cetus automated thermal cycler. The amplified product is analyzed by agarose gel electrophoresis. The PCR product is verified to be the selected sequence by subcloning and sequencing the DNA product.

[1319] Use of the above methodologies and/or other methodologies known in the art generates fragments from the clone corresponding to the approximate fragments described in Table 8, below. Accordingly, Table 8 provides a physical characterization of certain clones encompassed by the invention. The first column provides the unique clone identifier, “Clone ID NO:Z”, for cDNA clones of the invention, as described in Table 1A. The second column provides the approximate size of the cDNA insert contained in the corresponding cDNA clone.

TABLE 8

| | cDNA |
|---|---|
| Clone ID | Insert |
| NO:Z | Size: |
| HDPBG11 | 2100 |
| HKAJI55 | 1100 |
| HSDHB12 | 700 |
| HARMO91 | 3200 |
| HFPFB75 | 3000 |
| HFPGX08 | 1300 |
| HFXJD66 | 2000 |
| HKABY22 | 2400 |
| HMKAJ50 | 1600 |
| HNGME19 | 1400 |
| HTEPC92 | 1600 |
| HDPMQ42 | 1100 |
| HDPPU44 | 900 |
| HLTEO24 | 1200 |
| HOABR66 | 2200 |
| HWADF26 | 900 |
| HWAGT47 | 1100 |
| HUFCN91 | 2500 |
| HNHBF47 | 1000 |
| HOHEC71 | 2500 |
| HSDKI91 | 1600 |
| HUCNE72 | 1400 |
| HCEOW20 | 1100 |
| HNTSN2G | 1400 |
| HPWBSG3 | 400 |
| HCEENOG | 800 |
| HE8UX7E | 1800 |
| HFIAH37 | 1700 |
| HFPBW22 | 1000 |
| HFXLC69 | 1700 |
| HSCKS55 | 2300 |
| HSPBQ12 | 1100 |
| HTEFO45 | 900 |
| HTNGF69 | 800 |
| HBJIH60 | 1400 |
| HCE3P22 | 700 |
| HDTJI37 | 1300 |
| HLDON90 | 600 |
| HLTAZ78 | 1300 |
| HTLGG79 | 1700 |
| HTXJY67 | 1400 |
| HDTBD67 | 2200 |
| HOHCS04 | 1900 |

[1320] It will be clear that the invention may be practiced otherwise than as particularly described in the foregoing description and examples. Numerous modifications and variations of the present invention are possible in light of the above teachings and, therefore, are within the scope of the appended claims.

[1321] The entire disclosure of each document cited (including patents, patent applications, journal articles, abstracts, laboratory manuals, books, or other disclosures) in the Background of the Invention, Detailed Description, and Examples is hereby incorporated herein by reference. In addition, the CD-R copy of the sequence listing submitted herewith and the corresponding computer readable form are both incorporated herein by reference in their entireties. The specification and sequence listing of each of the following U.S. applications are herein incorporated by reference in their entirety: application Ser. No. 60/179,065, filed on Jan. 31, 2000; application Ser. No. 60/180,628, filed on Feb. 4, 2000; application Ser. No. 60/214,886, filed on Jun. 28, 2000; application Ser. No. 60/217,487, filed on Jun. 11, 2000; application Ser. No. 60/225,758, filed on Aug. 14, 2000; application Ser. No. 60/220,963, filed on Jul. 26, 2000; application Ser. No. 60/217,496, filed on Jul. 11, 2000; application Ser. No. 60/225,447, filed on Aug. 14, 2000; application Ser. No. 60/218,290, filed on Jul. 14, 2000; application Ser. No. 60/225,757, filed on Aug. 14, 2000; application Ser. No. 60/226,868, filed on Aug. 22, 2000; application Ser. No. 60/216,647, filed on Jul. 7, 2000; application Ser. No. 60/225,267, filed on Aug. 14, 2000; application Ser. No. 60/216,880, filed on Jul. 7, 2000; application Ser. No. 60/225,270, filed on Aug. 14, 2000; application Ser. No. 60/251,869, filed on Dec. 8, 2000; application Ser. No. 60/235,834, filed on Sep. 27, 2000; application Ser. No. 60/234,274, filed on Sep. 21, 2000; application Ser. No. 60/234,223, filed on Sep. 21, 2000; application Ser. No. 60/228,924, filed on Aug. 30, 2000; application Ser. No. 60/224,518, filed on Aug. 14, 2000; application Ser. No. 60/236,369, filed on Sep. 29, 2000; application Ser. No. 60/224,519, filed on Aug. 14, 2000; application Ser. No. 60/220,964, filed on Jul. 26, 2000; application Ser. No. 60/241,809, filed on Oct. 20, 2000; application Ser. No. 60/249,299, filed on Nov. 27, 2000; application Ser. No. 60/236,327, filed on Sep. 26, 2000; application Ser. No. 60/241,785, filed on Oct. 20, 2000; application Ser. No. 60/244,617, filed on Nov. 1, 2000; application Ser. No. 60/225,268, filed on Aug. 14, 2000; application Ser. No. 60/236,368, filed on Sep. 29, 2000; application Ser. No. 60/251,856, filed on Dec. 8, 2000; application Ser. No. 60/251,868, filed on Dec. 8, 2000; application Ser. No. 60/229,344, filed on Sep. 1, 2000; application Ser. No. 60/234,997, filed on Sep. 25, 2000; application Ser. No. 60/229,343, filed on Sep. 1, 2000; application Ser. No. 60/229,345, filed on Sep. 1, 2000; application Ser. No. 601229,287, filed on Sep. 1, 2000; application Ser. No. 60/229,513, filed on Sep. 5, 2000; application Ser. No. 60/231,413, filed on Sep. 8, 2000; application Ser. No. 60/229,509, filed on Sep. 5, 2000; application Ser. No. 60/236,367, filed on Sep. 29, 2000; application Ser. No. 60/237,039, filed on Oct. 2, 2000; application Ser. No. 60/237,038, filed on Oct. 2, 2000; application Ser. No. 60/236,370, filed on Sep. 29, 2000; application Ser. No. 60/236,802, filed on Oct. 2, 2000; application Ser. No. 60/237,037, filed on Oct. 2, 2000; application Ser. No. 60/237,040, filed on Oct. 1, 2000; application Ser. No. 60/240,960, filed on Oct. 20, 2000; application Ser. No. 60/239,935, filed on Oct. 13, 2000; application Ser. No. 60/239,937, filed on Oct. 13, 2000; application Ser. No. 60/241,787, filed on Oct. 20, 2000; application Ser. No. 60/246,474, filed on Nov. 8, 2000; application Ser. No. 60/246,532, filed on Nov. 8, 2000; application Ser. No. 60/249,216, filed on Nov. 17, 2000; application Ser. No. 60/249,210, filed on Nov. 17, 2000; application Ser. No. 60/226,681, filed on Aug. 22, 2000; application Ser. No. 60/225,759, filed on Aug. 14, 2000; application Ser. No. 60/225,213, filed on Aug. 14, 2000; application Ser. No. 60/227,182, filed on Aug. 22, 2000; application Ser. No. 60/225,214, filed on Aug. 14, 2000; application Ser. No. 60/235,836, filed on Sep. 27, 2000; application Ser. No. 60/230,438, filed on Sep. 6, 2000; application Ser. No. 60/215,135, filed on Jun. 30, 2000; application Ser. No. 60/225,266, filed on Aug. 14, 2000; application Ser. No. 60/249,218, filed on Nov. 17, 2000; application Ser. No. 60/249,208, filed on Nov. 17, 2000; application Ser. No. 60/249,213, filed on Nov. 17, 2000; application Ser. No. 60/249,2 12, filed on Nov. 17, 2000; application Ser. No. 60/249,207, filed on Nov. 17, 2000; application Ser. No. 60/249,245, filed on Nov. 17, 2000; application Ser. No. 60/249,244, filed on Nov. 17, 2000; application Ser. No. 60/249,217, filed on Nov. 17, 2000; application Ser. No. 60/249,211, filed on Nov. 17, 2000; application Ser. No. 60/249,215, filed on Nov. 17, 2000; application Ser. No. 60/249,264, filed on Nov. 17, 2000; application Ser. No. 60/249,214, filed on Nov. 17, 2000; application Ser. No. 60/249,297, filed on Nov. 17, 2000; application Ser. No. 60/232,400, filed on Sep. 14, 2000; application Ser. No. 60/231,242, filed on Sep. 8, 2000; application Ser. No. 60/232,081, filed on Sep. 8, 2000; application Ser. No. 60/232,080, filed on Sep. 8, 2000; application Ser. No. 60/231,414, filed on Sep. 8, 2000; application Ser. No. 60/231,244, filed on Sep. 8, 2000; application Ser. No. 60/233,064, filed on Sep. 14, 2000; application Ser. No. 60/233,063, filed on Sep. 14, 2000; application Ser. No. 60/232,397, filed on Sep. 14, 2000; application Ser. No. 60/232,399, filed on Sep. 14, 2000; application Ser. No. 60/232,401, filed on Sep. 14, 2000; application Ser. No. 60/241,808, filed on Oct. 20, 2000; application Ser. No. 60/241,826, filed on Oct. 20, 2000; application Ser. No. 60/241,786, filed on Oct. 20, 2000; application Ser. No. 60/241,221, filed on Oct. 20, 2000; application Ser. No. 60/246,475, filed on Nov. 8, 2000; application Ser. No. 60/231,243, filed on Sep. 8, 2000; application Ser. No. 60/233,065, filed on Sep. 14, 2000; application Ser. No. 60/232,398, filed on Sep. 14, 2000; application Ser. No. 60/234,998, filed on Sep. 25, 2000; application Ser. No. 60/246,477, filed on Nov. 8, 2000; application Ser. No. 60/246,528, filed on Nov. 8, 2000; application Ser. No. 60/246,525, filed on Nov. 8, 2000; application Ser. No. 60/246,476, filed on Nov. 8, 2000; application Ser. No. 60/246,526, filed on Nov. 8, 2000; application Ser. No. PT172, filed on Nov. 17, 2000; application Ser. No. 60/246,527, filed on Nov. 8, 2000; application Ser. No. 60/246,523, filed on Nov. 8, 2000; application Ser. No. 60/246,524, filed on Nov. 8, 2000; application Ser. No. 60/246,478, filed on Nov. 8, 2000; application Ser. No. 60/246,609, filed on Nov. 8, 2000; application Ser. No. 60/246,613, filed on Nov. 8, 2000; application Ser. No. 60/249,300, filed on Nov. 17, 2000; application Ser. No. 60/249,265, filed on Nov. 17, 2000; application Ser. No. 60/246,610, filed on Nov. 8, 2000; application Ser. No. 60/246,611, filed on Nov. 8, 2000; application Ser. No. 60/230,437, filed on Sep. 6, 2000; application Ser. No. 60/251,990, filed on Dec. 8, 2000; application Ser. No. 60/251,988, filed on Dec. 5, 2000; application Ser. No. 60/251,030, filed on Dec. 5, 2000; application Ser. No. 60/251,479, filed on Dec. 6, 2000; application Ser. No. PJ005, filed on Dec. 5, 2000; application Ser. No. PJ006, filed on Dec. 1, 2000; application Ser. No. 60/251,989, filed on Dec. 8, 2000; application Ser. No. 60/250,391, filed on Dec. 1, 2000; and application Ser. No. 60/254,097, filed on Dec. 11, 2000.

[1322] Moreover, the microfiche copy and the corresponding computer readable form of the Sequence Listing of U.S. application Ser. No. 60/179,065, and the hard copy of and the corresponding computer readable form of the Sequence Listing of U.S. application Ser. No. 60/180,628 are also incorporated herein by reference in their entireties.

The application's sequence listing, which the Patent Office published only in electronic form, follows.

SEQUENCE LISTING (646 sequences)

SEQ ID NO: 1 - DNA, 733 bp, Homo sapiens
gggatccggagcccaaatcttctgacaaaactcacacatgcccaccgtgcccagcacctgaattcgagggtgcaccgtcagtcttcctcttccccccaaaacccaaggacaccctcatgatctcccggactcctgaggtcacatgcgtggtggtggacgtaagccacgaagaccctgaggtcaagttcaactggtacgtggacggcgtggaggtgcataatgccaagacaaagccgcgggaggagcagtacaacagcacgtaccgtgtggtcagcgtcctcaccgtcctgcaccaggactggctgaatggcaaggagtacaagtgcaaggtctccaacaaagccctcccaacccccatcgagaaaaccatctccaaagccaaagggcagccccgagaaccacaggtgtacaccctgcccccatcccgggatgagctgaccaagaaccaggtcagcctgacctgcctggtcaaaggcttctatccaagcgacatcgccgtggagtgggagagcaatgggcagccggagaacaactacaagaccacgcctcccgtgctggactccgacggctccttcttcctctacagcaagctcaccgtggacaagagcaggtggcagcaggggaacgtcttctcatgctccgtgatgcatgaggctctgcacaaccactacacgcagaagagcctctccctgtctccgggtaaatgagtgcgacggccgcgactctagaggat

SEQ ID NO: 2 - protein, 5 aa, Homo sapiens
  Site (3): Xaa equals any of the twenty naturally ocurring L-amino acids
WSXWS

SEQ ID NO: 3 - DNA, 86 bp, Artificial Sequence
  Primer_Bind: Synthetic sequence with 4 tandem copies of the GAS binding site found in the IRF1 promoter (Rothman et al., Immunity 1:457-468 (1994)), 18 nucleotides complementary to the SV40 early promoter, and a Xho I restriction site.
gcgcctcgagatttccccgaaatctagatttccccgaaatgatttccccgaaatgatttccccgaaatatctgccatctcaattag

SEQ ID NO: 4 - DNA, 27 bp, Artificial Sequence
  Primer_Bind: Synthetic sequence complementary to the SV40 promter; includes a Hind III restriction site.
gcggcaagctttttgcaaagcctaggc

SEQ ID NO: 5 - DNA, 271 bp, Artificial Sequence
  Protein_Bind: Synthetic promoter for use in biological assays; includes GAS binding sites found in the IRF1 promoter (Rothman et al., Immunity 1:457-468 (1994)).
ctcgagatttccccgaaatctagatttccccgaaatgatttccccgaaatgatttccccgaaatatctgccatctcaattagtcagcaaccatagtcccgcccctaactccgcccatcccgcccctaactccgcccagttccgcccattctccgccccatggctgactaattttttttatttatgcagaggccgaggccgcctcggcctctgagctattccagaagtagtgaggaggcttttttggaggcctaggcttttgcaaaaagctt

SEQ ID NO: 6 - DNA, 32 bp, Artificial Sequence
  Primer_Bind: Synthetic primer complementary to human genomic EGR-1 promoter sequence (Sakamoto et al., Oncogene 6:867-871 (1991)); includes a Xho I restriction site.
gcgctcgagggatgacagcgatagaaccccgg

SEQ ID NO: 7 - DNA, 31 bp, Artificial Sequence
  Primer_Bind: Synthetic primer complementary to human genomic EGR-1 promoter sequence (Sakamoto et al., Oncogene 6:867-871 (1991)); includes a Hind III restriction site.
gcgaagcttcgcgactccccggatccgcctc

SEQ ID NO: 8 - DNA, 12 bp, Homo sapiens
ggggactttccc

SEQ ID NO: 9 - DNA, 73 bp, Artificial Sequence
  Primer_Bind: Synthetic primer with 4 tandem copies of the NF-KB binding site (GGGGACTTTCCC), 18 nucleotides complementary to the 5' end of the SV40 early promoter sequence, and a XhoI restriction site.
gcggcctcgaggggactttcccggggactttccggggactttccgggactttccatcctgccatctcaattag

SEQ ID NO: 10 - DNA, 256 bp, Artificial Sequence
  Protein_Bind: Synthetic promoter for use in biological assays; includes NF-KB binding sites.
ctcgaggggactttcccggggactttccggggactttccgggactttccatctgccatctcaattagtcagcaaccatagtcccgcccctaactccgcccatcccgcccctaactccgcccagttccgcccattctccgccccatggctgactaattttttttatttatgcagaggccgaggccgcctcggcctctgagctattccagaagtagtgaggaggcttttttggaggcctaggcttttgcaaaaagctt

SEQ ID NO: 11 - DNA, 2310 bp, Homo sapiens
gatcagttatggctaaatcctgtccatctgtgtgtcgctgcgatgcgggtttcatttactgtaatgatcgctttctgacatccattccaacaggaataccagaggatgctacaactctctaccttcagaacaaccaaataaataatgctgggattccttcagatttgaaaaacttgctgaaagtagaaagaatatacctataccacaacagtttagatgaatttcctaccaacctcccaaagtatgtaaaagagttacatttgcaagaaaataacataaggactatcacttatgattcactttcaaaaattccctatctggaagaattacatttagatgacaactctgtctctgcagttagcatagaagagggagcattccgagacagcaactatctccgactgcttttcctgtcccgtaatcaccttagcacaattccctggggtttgcccaggactatagaagaactacgcttggatgataatcgcatatccactatttcatcaccatctcttcaaggtctcactagtctaaaacgcctggttctagatggaaacctgttgaacaatcatggtttaggtgacaaagttttcttcaacctagttaatttgacagagctgtccctggtgcggaattccctgactgctgcaccagtaaaccttccaggcacaaacctgaggaagctttatcttcaagataaccacatcaatcgggtgcccccaaatgctttttcttatctaaggcagctctatcgactggatatgtccaataataacctaagtaatttacctcagggtatctttgatgatttggacaatataacacaactgattcttcgcaacaatccctggtattgcgggtgcaagatgaaatgggtacgtgactggttacaatcactacctgtgaaggtcaacgtgcgtgggctcatgtgccaagccccagaaaaggttcgtgggatggctattaaggatctcaatgcagaactgtttgattgtaaggacagtgggattgtaagcaccattcagataaccactgcaatacccaacacagtgtatcctgcccaaggacagtggccagctccagtgaccaaacagccagatattaagaaccccaagctcactaaggatcaacaaaccacagggagtccctcaagaaaaacaattacaattactgtgaagtctgtcacctctgataccattcatatctcttggaaacttgctctacctatgactgctttgagactcagctggcttaaactgggccatagcccggcatttggatctataacagaaacaattgtaacaggggaacgcagtgagtacttggtcacagccctggagcctgattcaccctataaagtatgcatggttcccatggaaaccagcaacctctacctatttgatgaaactcctgtttgtattgagactgaaactgcaccccttcgaatgtacaaccctacaaccaccctcaatcgagagcaagagaaagaaccttacaaaaaccccaatttacctttggctgccatcattggtggggctgtggccctggttaccattgcccttcttgctttagtgtgttggtatgttcataggaatggatcgctcttctcaaggaactgtgcatatagcaaagggaggagaagaaaggatgactatgcagaagctggcactaagaaggacaactctatcctggaaatcagggaaacttcttttcagatgttaccaataagcaatgaacccatctcgaaggaggagtttgtaatacacaccatatttcctcctaatggaatgaatctgtacaaaaacaatcacagtgaaagcagtagtaaccgaagctacagagacagtggtattccagactcagatcactcacactcatgatgctgaaggactcacagcagacttgtgttttgggttttttaaacctaagggaggtgatggtaggaaccctgttctactgcaaaacactggaaaaagagactgaaaaaaagcaatgtactgtacatttgccatataatttatatttaagaactttttattaaaagtttcaaatttcaggttactgctgcgattgatgtagtggagatgcctgaacacaattctatattttagtattttttagtaatttgtactgtattttccttgcaaatattggagttataaaccatttactttgtgttctactgagtaagatgacttgttgactgtgaaagtgaattttcttgctgtgtcgaacaatcaggactgcattcatatgagatccttgtagtataagcacaggccatttttcactttggtattaataaaatgt

SEQ ID NO: 12 - DNA, 1200 bp, Homo sapiens
ggcacgagcaggatggcagagatcccgggggtcaagaagacaaagatgcccatctgagccaaggctggcaatgctgggcccagggccctggccccagctcccaacttcagcacaccatctctctccaccagacccagggccagggctgcgattctccaacggtgcccacttctgccgggtgtcaacaagccccagccggcccgaagcacagcagaaggcaaaggtgtctgcatctaggacctgcaggctactcagctcctcactgtcactgacatctggaagaccgacagcaaaggagacaagcggctggaggcagatgggtctggcaatttggcagggctggctggtcacaggtcccttcccaccagtcccaggcagaataaatcacatctcccttcccactcatctcaccattgtctgctcagctggttgggtgctggtccctgggactgcctaatcctgccccagcataggagcccttagaggccagggcttacctcttattcactgtgtatccccaacacctggcacagagagttgaactcagtttttatagtggctgagttgggctggggggtgatgccggctggagcagcaagcaagggacaaagtaccacggtacctgaggtgtacgtggtcttccgggactccagatcaacgacctgcagacttcggagcctcgccccatggaggactccgggtgccaatgtggagaagacggccaccctaggccagagactctcctctttctcatgcacagcaatggtgctgacagctttaatgacatctaggggaaaacgaagaggccaaaatccagaactttaatgaaggtttgaaacatgacaggctgccagctgtcttcccctgtacatttagaagatcaaggaagaaaaggagctgccggctggcaagagatgatgttgagacataactactctggcttatgtttacatttttgaaaccatcagaaacatttcaatttctttattatttgtcttataaactgttttttgcaaatggaagacaatgccatctcaaaacccaaaaagcaattctggctttttatacttttgtggagaacaggtagaagacaagaaaaggaatgaacatgctgctgatgtcacttaccccttcagcgacaagaaacaggtacagaattcatgaactgatattatttcttcaaaaacatgttccatgacc

SEQ ID NO: 13 - DNA, 777 bp, Homo sapiens
  SITE (1): n equals a,t,g, or c
  SITE (2): n equals a,t,g, or c
  SITE (9): n equals a,t,g, or c
  SITE (11): n equals a,t,g, or c
  SITE (494): n equals a,t,g, or c
nntgaattncnttgaaaaccccccgacactatagaaggtacgcctgcaggtaccggtccggaattcccgggtcgacccacgcgtccggtaaactgttattattttaccatgcagaagaaagactggaagggatgtaaacagacttgtcaacattgtagatcatcccttttgaagatagatgacaaagatgaactcgtattttacattcacttttattctcttggactctgtttctcaatgttggacctaagatattgaagacaggctggagtccagagccttcattcaatctcagatttatgaaaataattactggattggattatcatatgatgaaagggaaagtaagtggaaatggattgataatggcacatctcctggaattaattctacaataatgcgtttttcttctgggagaggagaatgtgcatttttgacctcaacaagaatggcaactattgattgcattcaaacgtacaattgtatctgtgggnaagagaatagactctattttctctgattcggtgtgcgccaagaagaaaaggtgaaaatggaatgttttcttttttttttcccataataatttctgattataaatcattgcttttaactgkgggacttagttaattcttcaaaagataaagatgaacaggaagaaaaagaaaattattttggactatgactttaaagatcagatgccatctttcttcctggagaagaggagattttctcttttgagagtggttgttccttcctttaatgtccctgaggaattat

SEQ ID NO: 14 - DNA, 2099 bp, Homo sapiens
ccacgcgtccgctcaggatgactgtggagaaggaggcccctgatgcgcacttcactgtggacaaacagaacatctccctctggccccgagagcctcctcccaagtccggtccatctctggtcccggggaaaacacccacagtccgtgctgcattaatctgcctgacgctggtcctggtcgtctccgtcctgctgcaggccgtcctttatccccggtttatgggcaccatatcagatgtaaagaccaatgtccagttgctgaaaggtcgtgtggacaacatcagcaccctggattctgaaattaaaaagaatagtgacggcatggaggcagctggcgttcagatccagatggtgaatgagagcctgggttatgtgcgttctcagttcctgaagttaaaaaccagtgtggagaaggccaacgcacagatccagatcttaacaagaagttgggaagaagtcagtaccttaaatgcccaaatcccagagttaaaaagtgatttggagaaagccagtgctttaaatacaaagatccgggcactccagggcagcttggagaatatgagcaagttgctcaaacgacaaaatgatattctacaggtggtttctcaaggctggaagtacttcaaggggaacttctattacttttctctcattccaaagacctggtatagtgccgagcagttctgtgtgtccaggaattcacacctgacctcggtgacctcagagagtgagcaggagtttctgtataaaacagcggggggactcatctactggattggcctgactaaagcagggatggaaggggactggtcctgggtggatgacacgccattcaacaaggtccaaagtgcgaggttctggattccaggtgagcccaacaatgctgggaacaatgaacactgtggcaatataaaggctccctcacttcaggcctggaatgatgccccatgtgacaaaacgtttcttttcatttgtaagcgaccctatgtcccatcagaaccgtgacaggacaggctcccaagctcactctttgagctccaacgcttgttaaacatgaggaaatgcctctttcttccccagactccaggatgactttgcacgttaatttttcttgcttcaaaattgtcccacagtggcattctggagtccgtctgtcttggctggaaattctctgacgtcttggaggcagctggaatggaaaggagaattcaggttaaagtgggaggggtgggtagagaggatttagaagttccaattgccctgctaaggaggatcaagacccgtaatccggcacaacaccctggggttttccactctttcagagaaacctcagcttcatcacatcaaagttactccagagcaaccaagcaattctcctgatattgtcatccagggcttttcttggccaaaccccctagaatttccatgtctctgcttagctgtgctggcagctagcagctggctgtgtttgcagtgcaaatagctctgttcttggaaatcctgctcatggtatgtccccagtggtttcttcatccacatcatctaaagcctgaacccgttcttctctggttcaagtcagtggctgacacggacttgtatctccttcagagctcggctggcacccagcctcccttctccttccactcccttagtacactggagtgccgagccctgccttccacccagcgtccatccagcccctgtcctcacctctccggcacctcctcctccttctgcatttcctatcttcctgtgtcttgtgcatgggaagcagccttcagtgccttcatgaattcaccttccagcttcctcagaataaaatgctgcctgggtcaaggactcactccaagtgcactttttcatttctggttgtccaggtgaatatgtgggaaaggcagtctcctctggtggacatgaagttctagggtatcctcaggaaacatctggggagtcaaaaataacaaggactggggaagttccagtcctggaaatgccacaaaatgtgaccagtacttatctctagtttttattaaagtagagcaaggtctccaaaaaaaaaaaaaaaaaaaaaaaaaaaaaaaaaaaaaaaaaaaaaaaaaa

SEQ ID NO: 15 - DNA, 1066 bp, Homo sapiens
ccacgcgtccgctctgcagacaggtgggccaatgtgaaggtggagtgcgagccgagctggcagcccttccagggccactgctaccgcctgcaggccgagaagcgcagctggcaggagtccaagaaggcatgtctacggggcggtggcgacctggtcagcatccacagcatggcggagctggaattcatcaccaagcagatcaagcaagaggtggaggagctgtggatcggcctcaacgatttgaaactgcagatgaattttgagtggtctgacgggagccttgtgagcttcacccactggcacccctttgagcccaacaacttccgggacagtctggaggactgtgtcaccatctggggcccggaaggccgctggaacgacagtccctgtaaccagtccttgccatccatctgcaagaaggcaggccagctgagccagggggccgccgaggaggaccatggctgccggaagggttggacgtggcacagcccatcctgctactggctgggagaagaccaagtgacctacagtgaggcccggcgcctgtgcactgaccatggctctcagctggtcaccatcaccaacaggttcgagcaggccttcgtcagcagcctcatctacaactgggagggcgagtacttctggacggccctgcaggacctcaacagcaccggctccttcttctggctcagtggggatgaagtcatgtacacccactggaaccgggaccagcccggtgagccccttctttgacttgccttggtgaagcgaggagggaggccagggtggactggccctgccagcaccgagccccagggcttccccataaacagatcattggtgcactgtggtgtagtgtctatgagcacaagctctgaaaccaaactgcctggctccgatcatgactctgccatcttttagctgtgcatcctctgagcctcagttttctcatctgtccagtgggaataatgatcctttcctcatagggatgacatgagtcttaaatatgtgtaaagtgctaatatgtgtaaagagttaatgtgtgtaaaaaaaaaaaaaaaaaaaa

SEQ ID NO: 16 - DNA, 743 bp, Homo sapiens
  SITE (681): n equals a,t,g, or c
  SITE (718): n equals a,t,g, or c
gtaagctttcagcagatgacgtggcgaacaaatatgactggcatggcagggctagctggcctgaagcatgacattgcccgtgtaagagctgacaccaaccagtccctggtggaactttggggcttattagaattttgtggccaaggcccatggctctccacgggtgtactggctggggctgaatgacagggcccaggaaggggactggaggtggctggatgggtctcctgtgacattaagcttctgggagccagaggaacccaataacatccacgatgaggactgtgctaccatgaacaaaggtggcacctggaatgatctctcttgctacaaaactacgtattggatttgtgagcggaaatgttcctgttgaagcccagggctgaggctgggggtccatatctgagtgtctctttgagatgagaatctcctgccctttcgtggacggccttgcctcttcgtgagtggacacacagatgtgcctcaaacaggattggcaccctggatgcagcaagttcccaggggtgcaagtcargctgtttctagagtgaggacttgggcttgscctartaratggtgagctkggaggatgctyararcttggtggtgggagggctyccamttctggggttgaarggatcttactaagttcygatcatgactyttsggaagkgaactagnccttgaggacctgggctggggttaacctgggatgaanaaccggggcttgaacccaaaagttg

SEQ ID NO: 17 - DNA, 711 bp, Homo sapiens
  SITE (481): n equals a,t,g, or c
  SITE (630): n equals a,t,g, or c
  SITE (650): n equals a,t,g, or c
  SITE (691): n equals a,t,g, or c
  SITE (695): n equals a,t,g, or c
  SITE (703): n equals a,t,g, or c
gctgggctgaagggagctagaggcaaaatgatatctgctgggcttccaggagagatgggatcccctggggaaccaggacctcctggacgtaagggtgtgaaaggagccaaaggcttggcttcattttctacatgtgagctcattcagtatgtgcgagaccgcagtcctggcaggcatggaaaaccggaatgcccagtgcacccaaccgagttggtgtttgccctggaccactcccgggatgtcactgagcaggaatttgagcggatgaaggagatgatggctttcctggtgagagacattaaggtccgggagaacagctgccccgtgggagcgcacatcgccatcctctcctataactcccacgccaggcaccttgtgcgcttctcagacgcctacaagaagagtcaacttctcagagaaattgaaactattccttatgagagatcctctgccagcagggagattggcagagcaatgcggnttatttccaggaatgtcttcaagcggacgcttycgggggcacacacgagaaaaatcgccacatttttcagcagcggtcaagtccgcggatgcccactccatyaccacggcttgccatggaagttcggcgccgcttgaaatcattcccgnggtgatcacttttacaacgngcccttggtcaaggcgcgcatttgcgaatgacgacactggnacanttcaaggnaatagtgg

SEQ ID NO: 18 - DNA, 797 bp, Homo sapiens
  SITE (36): n equals a,t,g, or c
  SITE (711): n equals a,t,g, or c
tggaaaagcccggccgccaccgtggtgaacactatntatgctgttggggtaggaaaagccattgaggaggaactacaagagattgcctttgagcccacaaacaagcatctcttctatgccgaagacttcagcacaatggatgagataagtgaaaaactcaagaaaggcatctgtgaagctctagaagactccgatggaagacaggactctccagcaggggaactgccaaaaacggtccaacagccaacagaatctgagccagtcaccataaatatccaagacctactttcctgttctaattttgcagtgcaacacagatatctgtttgaagaagacaatcttttacggtytacacaaaagctttcccattcaacaaaaaccttcaggaagccctttggaagaaaaacacgatcaatgcaaatgtgaaaaccttataatgttccagaaccttgcaaacgaagaagtaagaaaattaacacagcgcttagaagaaatgaccagagaatggaagccctggaaaatcgctgagatcagatgaagattagaaatcgcgacacatttgtagtcattgkatcacggattacaatgaacgcagtgcaragccccaaagytmaggctattgktaaatcaataatgttgtgaagtaaamcaatcagtactgagaaacctggtttgccacagaacaaagacaagaagtatacactaacttgnataaatttatctaggaaaaaaatccttcagaattctaagatgaatttaccaggtgagaattgttctagaggtcgacggggcgttcc

SEQ ID NO: 19 - DNA, 728 bp, Homo sapiens
  SITE (668): n equals a,t,g, or c
  SITE (698): n equals a,t,g, or c
gggatttctggcttgtgggcccttatatgcctatagatgtggacatttgcattacacaactggaatctgttctgacgtcagccccacatttcaagtcgtgaattccattgcccctgtacaagaatgcagcactcaactggacatagtcatagtgctggatggttccaacagtatttacccatgggacagtgttacagcttttttaaatgaccttcttgaaagaatggatattggtcctaaacagacacaggttggaattgtacagtatggagaaaacgtgacccatgagttcaacctcaataagtattcttccaccgaagaggtacttgttgcagcaaagaaaatagtccagagaggtggccgccagactatgacagctcttggaatagacacagcaaggtggaaagctaattacccatgctctcacttcatctgcctgctaagatgactgttttaagaaggttaaaaaagttaataatgatcctgcaaagaatggattggatattcaaaattttataatttcatgtacagcttttgcctcatgaataytagaaaatcatctgctctaggtatatggggcccaagagaaaataccmcaaacagatggagaaaggaggcattcacggaagccggggtgcccgaagaggagttaaaaagcatggtattgngcagatgagagctatgcatatgctgagagnctccagatggaaataaacatcacggttcta

SEQ ID NO: 20 - DNA, 533 bp, Homo sapiens
  SITE (5): n equals a,t,g, or c
  SITE (6): n equals a,t,g, or c
  SITE (8): n equals a,t,g, or c
  SITE (22): n equals a,t,g, or c
  SITE (491): n equals a,t,g, or c
gtcanncngccagtcacggtcngaattcccgggtcgacccacgcgtccgggccctggctgagaggcgttaggagtccgggggttcgcccgcggaggccggggagcagccgaccatggagccccagaaaatcatgccaccctcaaagcctcatccacctgtcgtsggcaaagtgactcatcacagcattgaattatactgggatctggaaaagaaagccaaacgccaaggacctcaagagcagtggttcagsttctcgattgaagaagaagaccccaaaatgcacacttatggtatcatttatacgggatatgcaacgaagcatgttgttgaargtctggaaccaaggacgctgtacagatttcgcctgaaggtcaccagcccctctggggagtgtgagtacagcccactcgtctcagtgtctacaaccagagagcccataagtagtgagcacttgcaacgggctgtcagtgtgaatgatgaagatttgctngtccgaatacttcaaaggaggccgtgttaaaggttatgttcc

SEQ ID NO: 21 - DNA, 732 bp, Homo sapiens
  SITE (583): n equals a,t,g, or c
  SITE (608): n equals a,t,g, or c
  SITE (620): n equals a,t,g, or c
  SITE (621): n equals a,t,g, or c
  SITE (673): n equals a,t,g, or c
  SITE (691): n equals a,t,g, or c
  SITE (706): n equals a,t,g, or c
cagctctaatacgactcactatagggaaagctggtacgcctgcaggtaccggtccggaattcccgggtcgacccacgcgtccgcacatgttggttcaaggtctagaaccaaacaccaaatacgaatttgccgttcgattacatgtggatcagctttccagtccttggagccctgtagtctaccattctactcttccagaagcaccagcaggcccaccagttggagtaaaagtgacattaatagaggatgacactgccctggtttcttggaaaccccctgatggcccagaaacagttgtgacccgctatactatcttatatgcatctaggaaggcctggattgcaggagagtggcaggtcttacaccgtgaagggscaataaccatggctttgctagaaaacttggtagcaggaaatgtgtacattgtcaagatatctgcatccaatgaggtgggagaaggacccttttcaaattctgtggagctggcagtacttccaaaggaaacctctgaatcaaatcagagcccaagcgtttagattctgctgatgccaaagtttattcaggatattaccatctggaccanaaatcaatgactggcattgctgtangtgttggcatanncttgacctgcatcctcatctgtgttctcatcttgatatacccgaagtaaagncaggaaatcatctgcttncaagacggcacacantggaactcaacagttaccttgtacca

SEQ ID NO: 22 - DNA, 638 bp, Homo sapiens
ggcacgagcccatccccacccgggtctgcaaggtcagtgaccttcatgaaggccacttctatgagttccgtgcccgggctgccaactgggcaggtgttggcgagctgtcggcacccagcagcctgtttgagtgcaaagagtggacaatgccccagccaggccccccgtacgatgtacgggcatccgaggtgcgggctacatccctggtgctgcagtgggaacccccactgtatatgggggctgggcctgtcacaggctatcacgtcagtttccaggaggaaggctctgagcagtggaagccggtcaccccaggccccatctctggcacccacctgagggtttccgacttgcagccaggaaagagttacgtgttccaggtacaggccatgaattcagctggtctggggcaaccgtccatgcccactgatcccgtgctcctggaggacaagccaggtgcccatgagatcgaggttggtgtggatgaagagggctttatctatttggcttttgaagcccctgaagcccccgactcctcagagtttcagtggtccaaagactacaagggcccactggacccccagagggtcaagatcgaggataaagttaacaagtccaaggtcatcctgaaagaacccggc

SEQ ID NO: 23 - DNA, 3230 bp, Homo sapiens
agaatattccatagttttggaagcaagggacggtggaggaatgattgcgcaatgcacagtggaggtagaagtcatagatgaaaatgacaacgccccagaagtgatattccagtctctacccaacctaattatggaggacgccgagctgggaacacatattgctttgctcaaagtccgtgacaaggattccagacacaatggagaagtgacttgtaaattggaaggtgatgttccatttaaaatattaacttcttcaagaaacacgtataaattagtgacagatgctgttctagaccgcgagcagaatccagagtacaatataaccgttacggcaacagatcggggcaagcctcccctctcctccagttccagcatcaccctgcacattggtgatgtaaatgacaacgctccggttttctcacagtcttcctatatagtccacgtggccgagaacaacccgcctggagcctctatttcacaagtcagggcttctgatccggacttggggcccaacggccaagtctcttactgcatcatggccagtgacctggagcagcgggagctgtcatcctacgtgtccataagcgcggagagcggggtggtgttcgcgcagcgcgccttcgaccacgagcagctgcgcgccttcgaactcacactgcaggcccgcgaccagggctcgccagcgctcagcgcgaacgtgagcctgcgcgtgttagtggacgaccgcaacgacaatgcgccacgggtgctgtaccccgcgctgggtcccgacggctctgcgctcttcgatatggtgccgcacgctgcagagcctggctacttggtgaccaaggtagtggcggtggacgcagactcaggacacaacgcctggctgtcctaccacgtgctgcaggctagcgagcccgggctcttcagcctggggctgcgcacgggcgaagtgcgcacagcgcgtgccttaggcgacagggacgccgtccgccagcgccttctggtcgccgtgcgtgacggtggacagccaccactctcggccactgccacgttgcacctggtcttcgccgacagcttgcaggaggtgctgccggatatcactgaccgccccgacccctctgacctccaggctgagctgcagttttacctagtggtggccttggccttgatctcagtgctcttcctcgtggccatgattctggccattgccttgcgcctgcgacgctcctccagccccgcctcctggagctgcttccagcctggtctctgtgttaaatccgaatccgtggttccccccaactacagcgaggggactttgccttattcctacaatctatgtgttgcacatacaggaaagacggagtttaatttcctaaaatgtagtgagcagttgagttcaggacaagacatactttgcggtgattcatctggggccttatttccactttgtaattccagtgaattgacttcccatcaggtgagtttcctttaagtataatttaatgctcattgcctacccatttctccatattcacaagaaaatatacatatttgcaggaaaatatataatttttagatgtcatggatcattttaggaaagttgtagtcagttaaaaagctgtcatatcattctacaaaggaggagtaaagtaggagcaattgtgtggcccaacatttgtttgttttttagccaagcttatatttataaagcaatgagggtgtggttttaaccacaaagtgaaagtgttagacagttgttggctctctcctaaaaagtgaatgagatttttcctatacattttccttcttggtgactaatatatgatgaatacttttttcagcttggatataccataaatataaaaataataaagccaaagaatttaagctaaaattcaacacttttcttaactaatttaactggtatggtctccatagtagtccactgttttgtttcctgtggtaacttcccttttgtttcaaaagctcttagaataaggagtcaactggatttttatgtccatggaccccttgtgattatatgcagtgtacgctgtgtgtgcgtgtgtgtgtgtgtgtgtgtgagagagatccttttacttagaaaaaggtctactatgctcattagaagatcaaaagcagattctccttacttgtaacataggagtttcaggattaatctgtattcaagctcattctatatccttcatcaaagaaaagacaatgttttgtgtctgttgtccctctcacacacagccctaatatataatgtgtaactgccttatctgcagccctaaactaatatagctagaggtcttctaatcattctcctacctctaggaaagaaatatagtcttgaaaactgccaatctggtgtgcatacaaaatatatacaaaataccaaggaacattatatgagccttttgctaggtatatctaagcaactgcttcagttaatggccactttacaaattgctgaaagaaggaaacgtctttcgattcttttttttttctttttttttttttgagacagagtctctgtctgttactcaggctgtagtgcagtggcacaatgatagctccctccagcctcaaactcctgggctcaagcattccttctgcatcagcctcctgactagctggaactcaggctcatgccaccagacctggctaatttttctgttttcagtagagaaaatattttctttcactaatttaactggtatggtttccattgtctacccagttttccatatgcataagaaaatatattcacaggaaaatataaagttttcagatttcatgagtggttttaagaaagttttagtcagtgaaaaaactatcataccagtcttcaaaggaagggtgaaataagttcatctgctacgttgcccaggctggtcttgaagggaaacagacttttttgtagtcatacttatcctttggcttcttagtaagtattatatagtcattactttttgcagttttttagatcaaagtgttaatgtaggtaaagttaattttagaatatatgtaaaagtcaagtctgctttaaatttaatcatctctttggtgaaagggatgggatggagctttgctttttatcatatattcatctgtacctttcaagtattcaaatagaaaaatataaacaatgtaaataaaatagcaaaacaatgtaatatctcataaaactgcaatggtaaaagcaaaaaaaaaaaaaaaaaaaaaaaaaaaaaaaa

SEQ ID NO: 24 - DNA, 3027 bp, Homo sapiens
ggcacgagcttcgtgccaaggctatagacagaaaaactgggcggcaggtggaaccggaatcggaatttatcattaaaatacatgatatcaatgacaatgagccaaaatttacaaaagacttatacactgccagtgttcctgaaatgtctggagtcggtacatctgttatacaagtaactgcaacagatgcagatgacgccaactatggaaatagtgccaaagtggtctatagcatattgcaaggacagccatatttttcagtggacccagaatcaggcataataaaaactgcattaccagacatgagcagagaaaatagagagcagtaccaggttgttatacaggccaaagacatgggtggccagatgggaggcctttctggaaccaccacagtgaacatcacgctgacagatgtcaacaacaaccctcctcgatttccccagagtacgtatcaatttaattctcctgagtctgtacctcttggaactcatcttggaaggataaaagccaatgaccctgacgtgggggaaaatgcagaaatggagtatagcattgctgaaggagatggtgcagacatgttcgatgtcatcactgacaaggatacacaggaagggattataactgtcaaacagaatttagattttgaaaatcaaatgctctatactttaagagtggatgcaagtaacactcaccctgatccacgattcttacacctgggacctttcaaagatacagctgtggtcaaaatatctgtggaagatatagatgagcctcctgtgttcactaaagtctcttacttgatagaagtagatgaagatgtaaaggagggcagtatcattggacaggttacagcatacgatccagatgccaggaacaatttaataaagtactctgttgatcggcatactgatatggaccgtatttttggtattcactcagaaaatggttctattttcactttgaaagcccttgaccgggaatcatctccttggcataacatcactgttacagccacagaaataagtaagttggagctacatctacccgaagacactgtctttcatcaaagtggtaaaataatagcaccagctagactcattttcttgagtggtatgattgtatccttagcaagatcttagagaaatggcttagaatatcaacacatttttaaattatttttaaggattatcaaatcattcatttcaaatttgattttcttttacaccttatataggagagaaatataatttaacctcataaaaataatctaagaaaattatctattacaaataatacttcattctcaattatgttttcctcaattttattgtgcttttcttttggaccatgtaagagagctgagatattcatcagcagcccaattgagaaagtgaacaccacaaaaaggatctgttgctaagctacaaatgggtgagtggtttcactgcttctgtgtaaatgagactgaaatcttacacgtgttctcgttgcagataacccaaaacaaagtagccacatccctgtcttcatcagaattctagatataaatgaccatgctccggaatttgccatgtattatgaaacatttgtttgtgaaaatgcaaaacctgggcagttgattcagactgtcagtgtcatggataaggatgaccctccccgaggtcacaaattcttttttgaaccagtgccagaatttactctcaatccgaatttcaccattgtagataataaagataatacagcaggaatcatgactcggaaagatggctacagtcgcaacaaaatgagcacctacttattgccgattttaatctttgacaacgattatccaattcaaagcagcactggtacactcactatccgtgtgtgtgcctgcgataatcaaggaaacatgcaatcctgcaccgcagaagccctgatcctttcagccggcctgagcacgggagctctcgttgcgattctactctgtgtcctcatactgcttattttagtcgtgttgtttgctgcattgaagaggcaaagaaaaaaggaacctctgataatttcaaaagacgatgtccgggacaacattgtgacctacaacgatgaaggcggcggggaagaagatacccaagcttttgacattggcacattaaggaatccagaggcaagagaagacagtaaacttagacgggatgtaatgcctgaaactatttttcagataaggaggactgtgcctctgtgggaaaatattgatgtacaagattttatccatcgaagattaaaagaaaacgacgcagacccaagtgcacctccatatgattcgctggcaacgtatgcctatgaagggaatgattccatagcagattcgctcagttctttggaatctctcacagctgattgtaaccaagattatgattacctcagtgactgggggcctcgtttcaaaaaacttgccgatatgtatgggggtgatgatagtgaccgagactaagaggattgtttgacttaatcaatattagtggaagtactgtctatgttattagattgagtggcctgcattctcttcctgggaggaaatctttcaaaaattgaagttacaaacaatacgtagatgttgtcaagtagggatttgcttaatcagtaagtctttgtgaatgaatacgaatgatacagatttttaaaaaagtaataaccagttcaccctctttgcctaacaatctcggaaggaaaatatatcacatcaataatcaataaaaataagtaaaaggctttttgtgccttttcttaggtataataatttataaatgttttcttaactgactttcagtcacctttacaattaaactaaatattgtgcaaccgctttgtaaattaatatgaagaagatatatccctaatgaaataggaatgactattactgccatatttatttagttgaagaatgtctttgtgttaattcattcatatttttataaatgtatatttatatttttgtatttttatgaaataaactagtatttataaaacaaaaaaaaaaaaaaaaaa

SEQ ID NO: 25 - DNA, 1225 bp, Homo sapiens
ggcacgaggctcagaggagcaagcaaggtgccgaatggatgtccccaaaccaggagaacaagcaaaacaagaaaaagaaaagaaagaaaaggaagtctcccaaaagctctcttttgaactttgttactatcgaagagtccaaacccgatgatgcagttcatgaacctatcaatgggacaataagcctgccggctgaactggaggagcaaagtataggaagatttgactggggcccggcacctccaacaacattcaagcctaacagtcctgacctggccaagcactacaaatctgcttctccacagcctgcttttcatctcaaaccagacactccagtttccgtgaaaaagcaccacgtgattcaggaactccctttggacaacacctttgttgggggttgtgacaccctttctaaacgctcttccactagttcagatcacttcagtgcctcagagtgcagttcccaaggaggcttcaagacaaagggccccttacacaccagacaggtaaacgagcacttttactggtctataagtactgcatacaagtgcccagtcaaccagtattaacgtgccagtatgtctattgttttggtctaactttagcttagttagaaagaggtaaaaaaaaacttgaccccttttctattcctctggggctcagtcaagaatttttagaacagctttgaaatttctgagttctgagaatattttttcctttcagtttccttcaaatggcaaaagatgaaaagagaaaattattccaaaatgtcccaagataatgtttgctgaagaagaaaaaacctgtcctgatatgccaaattctgctcctgggggtttccaaattgactgcttcaagactttcaccttaccttttgatctaaaaagtcaccttcaaatctcaagttttcaatgacttttgaaggtgtgactgcaattatgttgcagctatggttgctaaaggggttaattttttttttagtctctaaacaggatagtagaatattaaatgtacatcagctgtgaagcacatgatcgttgatagattgcaactaagccatataggaagtcttctctttgatttcaaattattttattgtaatatattaaattcgatacttaatagaaagatttttagtgtccgcagtggccaaatactctttcaaaaaaaaaaaaaagaatgcttgctgcctaatataactgatttaaaaaaaaaagaaaaaaaa

SEQ ID NO: 26 - DNA, 1985 bp, Homo sapiens
ctgcaggaattcggcacgagttacagcattgaagaggatgattcgcaaacatttgacattattactaatcatgaaactcaagaaggaatagttatattaaaaaagaaagtggattttgagcaccagaaccactacggtattagagcaaaagttaaaaaccatcatgttcctgagcagctcatgaagtaccacactgaggcttccaccactttcattaagatccaggtggaagatgttgatgagcctcctcttttcctccttccatattatgtatttgaagtttttgaagaaaccccacagggatcatttgtaggcgtggtgtctgccacagacccagacaataggaaatctcctatcaggtattctattactaggagcaaagtgttcaatatcaatgataatggtacaatcactacaagtaactcactggatcgtgaaatcagtgcttggtacaacctaagtattacagccacagaaaaatacaatatagaacagatctcttcgatcccactgtatgtgcaagttcttaacatcaatgatcatgctcctgagttctctcaatactatgagacttatgtttgtgaaaatgcaggctctggtcaggtaattcagactatcagtgcagtggatagagatgaatccatagaagagcaccatttttactttaatctatctgtagaagacactaacaattcaagttttacaatcatagataatcaagataacacagctgtcattttgactaatagaactggttttaaccttcaagaagaacctgtcttctacatctccatcttaattgccgacaatggaatcccgtcacttacaagtacaaacacacttaccatccatgtctgtgactgtggtgacagtgggagcacacagacctgccagtaccaggagcttgtgctttccatgggattcaagacagaagtcatcattgctattctcatttgcattatgatcatatttgggtttatttttttgactttgggtttaaaacaacggagaaaacagattctatttcctgagaaaagtgaagatttcagagagaatatattccaatatgatgatgaagggggtggagaagaagatacagaggcctttgatatagcagagctgaggagtagtaccataatgcgggaacgcaagactcggaaaaccacaagcgctgagatcaggagcctatacaggcagtctttgcaagttggccccgacagtgccatattcaggaaattcattctggaaaagctcgaagaagctaatactgatccgtgtgcccctccttttgattccctccagacctacgcttttgagggaacaggttcattagctggatccctgagctccttagaatcagcagtctctgatcaggatgaaagctatgattaccttaatgagttgggacctcgctttaaaagattagcatgcatgtttggttctgcagtgcagtcaaataattagggctttttaccatcaaaatttttaaaagtgctaatgtgtattcgaacccaatggtagtcttaaagagttttgtgccctggctctatggcggggaaagccctagtctatggagttttctgatttccctggagtaaatactccatggttattttaagctacctacatgctgtcattgaacagagatgtggggagaaatgtaaacaatcagctcacaggcatcaatacaaccagatttgaagtaaaataatttaggaagatattaaaagtagatgagaggacacaagatgtagtcgatccttatgcgattatatcattatttacttaggaaagagtaaaaataccaaacgagaaaatttaaaggagcaaaaatttgcaagtcaaatagaaatgtacaaatcgagataacatttacatttctatcatattgacatgaaaattgaaaatgtatagtcagagaaattttcatgaattattccatgaagtattgtttcctttatttaaaaaaaaaaaaaaaaaaaaaa

SEQ ID NO: 27 - DNA, 2379 bp, Homo sapiens
ccacgcgtccgctctgcagctcctggccagctgattcaggtcatccgggccctggacagagatgaagttggcaacagtagccatgtctcctttcaaggtcctctgggccctgatgccaactttactgtccaggacaaccgagatggctccgccagcctgctgctgccctcccgccctgctccaccccgccatgccccctacttggttcccatagaactgtgggactgggggcagccggcgctgagcagcactgccacagtgactgttagtgtgtgccgctgccagcctgacggctctgtggcatcctgctggcctgaggctcacctctcagctgctgggctcagcaccggcgccctgcttgccatcatcacctgtgtgggtgccctgcttggtgagtcaggccacagtggtacatagctgtgcgatctgggcctgcaggggtgtggagaagaaccaggcctctggacacagggaaatccaccttagggcttgaacgaccctcatacctggattttcccaccacctgatgcatccaagagaaaagctctggcctctatcagtgacctgccaatccataatgacaatgacaagccataacaatggtttactgagcccctactctgtgccaagtatagtgctgggcacgtcacttgtgatatttcattttattatgtcaacaacccttagaagtaaatatattttccctattctccacataagtaatctaaggggcaaattgaggcttcagagaagtctagcaacttcccatggtcacatagcgagtaagggctgaagtcaggattcaatgcaaggtttgctagatgtcagcccctaagcacagggcttctgtacctgatgggtcagcctttcacatggagacaggccgcccgctcccggccctgctggctcagggcctgtgtgcgcgcctctcgcgcagccctggtggtgctcttcgtggccctgcggcggcagaagcaagaagcactgatggtactggaggaggaggacgtccgagagaacatcatcacctacgacgacgagggcggcggcgaggaggacaccgaggccttcgacatcacggccttgcagaacccggacggggcggcccccccggcgcccggccctcccgcgcgccgagacgtgttgccccgggcccgggtgtcgcgccagcccagaccccccggccccgccgacgtggcgcagctcctggcgctgcggctccgcgaggcggacgaggaccccggcgtacccccgtacgactcggtgcaggtgtacggctacgagggccgcggctcctcttgcggctccctcagctccctgggctccggcagcgaagccggcggcgcccccggccccgcggagccgctggacgactggggtccgctcttccgcaccctggccgagctgtatggggccaaggagcccccggccccctgagcgcccgggctggcccggcccaccgcggggggggggcagcgggcacaggccctctgagtgagccccacggggtccaggcgggcggcagcagcccaggggccccaggcctcctccctgtccttgtgtccctccttgcttccccggggcaccctcgctctcacctccctcctcctgagtcggtgtgtgtgtctctctccaggaatctttgtctctatctgtgacacgctcctctgtccgggcctgggtttcctgccctggccctggccctgcgatctctcactgtgattcctctccttcctccgtggcgttttgtctctgcagttctgaagctcacacatagtctccctgcgtcttccttgcccatacacatgctctgtgtctgtctcctgcccacatctcccttccttctctctgggtccctgtgactggctttttgtttttttctgttgtccatcccaaaatcaagagaaacttccagccactgctgcccaccctcctgcaggggatgttgtgccccaggtcagtgcccctagactgtggggcagggcggtggatgaaggctcccactccccactgcctctaacgtggctcccctgtccttacagacctgcctgcatggttccatccattactcatggcctcagcctcatcctggctccactggcctccagctgagagagggaaccagcctgcctcccagggcaagagctccagcctcccgtgtggccgcctccctggagctctgcccagctgccagcttcccctgggcatcccagccctgggcattgtcttgtgtgcttcctgagggagtagggaaaggaaagggggaggcggctggggaaggggaaagagggaggaaggggaggggcctccatctctaatttcataataaacaaacactttattttgtaaaaaaaaaaaaaaaaaaaaaaaaaaaaaaaa

SEQ ID NO: 28 - DNA, 1667 bp, Homo sapiens
ggcacgaggggattcaggctgtggctaatgtgctggaagcacgcacagttgtgaccatcaagtatgcaggaagcaatcattctcctggctctcctgggtgccatgtcagggggagaagcactacacctaatcctcttacctgctacaggcaatgtggcagagaattctccacctgggacttcagtgcacaagttttctgtgaagttatcagcatcattgtcacctgtgatcccaggatttccccagatagtcaactcaaatcccctcactgaagcttttagggtgaattggctgtcaggcacctactttgaggttgtcaccactgggatggaacaactagattttgaaacaggaccaaacatatttgatttgcagatttatgtgaaggatgaggttggtgtcacagacctgcaagtcctgactgtccaggtaacagatgtgaacgagccacctcagtttcaaggcaacttggcagaaggtaggatacaccaggatgtgcactgcagcccagacagtggcatcagggagggccctgggggacagagagaaacagaaaaagtaaataaacaagcagctgtttccctggaaaaggcagctgcttaatgagcagggaataaatgaaatgtcctccagctcaacactcccaataataatgtccaacagtttgcaaagcccttcacaggcagggtttctcctggtcccctcccagtcccagggaggaaactgaagctcagagagagacctcgagtggatcattgtggaggaacctggctgagctgcccctaggctcatccctgtgtaccctggtcattgactggcttgttcattctccccatggactctgacttcttgagggcagcgtgtttctgctacaatagggacaatgtaagggaccagagcacacagtaactaatgtcttacaggatctcccccaagctcatggctttgagcatcatccctattctgacaactttcaagtctgtcatttcagttcaggttctgccctgagctgtggcggtcgtaacacaaacatccacctttctcacccagcatctccacttggatgtttgacaggtcaaacttaatgtgcttctgaaccaaactcctggcttcctctccaccctccacccccacccaaatctgcttctcctatatctttcccattttggttagcagtaactccatccttcctgttgcttggaccaagccttgagtcatccttgactcctctctctttcacacttgacatgaaatcctttaggaaatcttgccagcttctaaatatacccagaacctggccccaccctagtgtctgcatcactaccaccatggtccaagccactcatcccatctcacctggattgttgcaatggctggcagctggcctcccagcccccctgcagtctgttttccatactgcagtcagagggatcctattaaaacgtcagttaaatcaaggcactcctctgcttaaaaccctacaagaaattcccgtctcactcaaagggagtctccttaagaaccaattaaaggccgggcgcggtggctcacgcctgtaatctcagcactttgggaggccgaggcaggtggatcacgaggtcaggagattgagaccatcctggctaacatggtgaaaccccatctctactaaaaaaaaaaaaaaaaaa

SEQ ID NO: 29 - DNA, 1674 bp, Homo sapiens
gtaaccgacttactatagggaaagctggtacgcctgcaggtaccggtccggaattcccgggtcgacccacgcgtccgaatcttactgttattgctgctgaaatcaacaatcccaaagagacaacacgcgtggctgtttttgtgagaattttggatgttaatgacaatgccccacagtttgctgtgttctatgacacttttgtatgtgaaaatgccagaccagggcagctaatacagactataagtgcagtagacaaagatgaccctttaggtggacagaaattttttttcagtttagctgctgtcaatccaaacttcacagtacaggataatgaagataatactgccagaatcttaaccagaaaaaatggattcaatagacatgaaatcagtacctatctcttgcctgtggtgatatcagacaatgattacccaattcagagcagcacaggcacactgaccattcgagtgtgtgcttgtgacagccaaggcaacatgcaatcctgcagtgctgaagccctgctcctccctgccggcctcagcactggggccttgatcgccatcctcctctgcatcatcattctactggttatagtagtactgtttgcagctctgaaaagacagcgaaaaaaagagcctctgatcttgtcaaaagaagatatcagagacaacattgtgagctataacgatgagggtggtggagaggaggacacccaggcctttgatatcggcaccctgaggaatcctgcagccattgaggaaaaaaagctccggcgagatattattccagaaacgttatttattcctcggaggactcctacagctccagataacacggacgtccgggatttcattaatgaaaggctaaaagagcatgatcttgaccccaccgcacccccctacgactcacttgcaacctatgcctatgaaggaaatgattccattgctgaatctctgagttcattagaatcaggtactactgaaggagaccaaaactacgattacctccgagaatggggccctcggtttaataagctagcagaaatgtatggtggtggggaaagtgacaaagactcttaacgtaggatatatgttctgttcaaacaagagaaagtaactctacccatgctgtctccacttcacaatatttgatattcaggagcattttcctgccagtcagcacaattttttttctcatttacttcttaatttgttcattaattacattaattctttcctgtaggatgtctcatggaatatatatgacattttatttaatcacttccaagagccaaagctatggaaatacagtgttgtccatcttagtaaataaaagataatttcagaaacatgaacaggatagttctcccttaagcaacctcacaaacaagccgcttctgttaggtacatgtcctgcccttgcaaatgaagcttttaaaaaggtgaagaaaaattttacagtatatcctgttctgtacattaaattaaaaaaacaaaaatgtacatgtgatgttagtaggtgtgatatgcaacctggtatacagacatttgtgcaatttcatttcatcaaattctatctgctaatgttttatatttatatttttgtatttatttttaaaaaaataaaccagtttttacaactaaaaaaaaaaaaaaaaaaaaaaaaaaaaaaatt

SEQ ID NO: 30 - DNA, 1440 bp, Homo sapiens
gcacgaggctgtatgctacagatgccgacagcgaggagagaggccaagtttcatattttctgggacctgatgctccatcatatttttccttagacagtgtcacaggaattctgacagtttctactcagctggaccgagaagagaaagaaaagtacagatacactgtcagagctgttgactgtgggaagccacccagagaatcagtagccactgtggccctcacagtgttggataaaaatgacaacagtcctcggtttatcaacaaggacttcagcttttttgtgcctgaaaactttccaggctatggtgagattggagtaattagtgtaacagatgctgacgctggacgaaatggatgggtcgccctctctgtggtgaaccagagtgatatttttgtcatagatacaggaaagggtatgctgagggctaaagtctctttggacagagagcagcaaagctcctatactttgtgggttgaagctgttgatgggggtgagcctgccctctcctctacagcaaaaatcacaattctccttctagatatcaatgacaaccctcctcttgttttgtttcctcagtctaatatgtcttatctgttagtactgccttctactctgccaggctccccggttacagaagtctatgctgtcgacaaagacacaggcatgaatgctgtcatagcttacagcatcatagggagaagaggtcctaggcctgagtccttcaggattgaccctaaaactggcaacattactttggaagaggcattgctgcagacagattatgggctccatcgcttactggtgaaagtgagtgatcatggttatcccgagcctctccactccacagtcatggtgaacctatttgtcaatgacactgtcagtaatgagagttacattgagagtcttttaagaaaagaaccagagattaatatagaggagaaagaaccacaaatctcaatagaaccgactcataggaaggtagaatctgtgtcttgtatgcccaccttagtagctctgtctgtaataagcttgggttccatcacactggtcacagggatgggcatatacatctgtttaaggaaaggggaaaagcatcccagggaagatgaaaatttggaagtacagattccactgaaaggaaaaattgacttgcatatgcgagagagaaagccaatggatatttctaatatttgatatttcatggtggaataacacagagaaatgttttaactgactttggatcttcttcacctaaaaaagagtgtgttgatggcagttccaatgaaggacaactaatttataacttgttctatattgtaaatagctgtttacaggtttttaaatttaaattcagaggttataaaatgtgtacagcatttttaagtgaaaattagtactaacagctataggacttgtatttaaaaaaaaaaaaaaaaaa

SEQ ID NO: 31 - DNA, 4158 bp, Homo sapiens
  SITE (12): n equals a,t,g, or c
  SITE (16): n equals a,t,g, or c
  SITE (22): n equals a,t,g, or c
ttacaggacccngctnggaacngtaggtgacactatagaaggtacgcctgcaggtaccggtccggaattcccgggtcgacccacgcgtccgctgccattgactttgaaaagtccaaagtattaaccttcaagctcctggctgttgaagtgaacaccccagagaagttcagttccacagcggatgttgtgatccagctcctggacaccaatgacaatgtccccaagttcgactccctctactacgttgccaggattcctgagaacgccccagggggctccagcgtggtggctgtcacagctgtggatccagatacaggaccctggggcgaagtgaaatattccacctatgggactggggcagacctcttcctgatccacccatccactgggcttatctacacccagccctgggctagcctggacgctgaggccactgccaggtacaacttctatgtgaaggcagaggacatggagggcaagtacagcgtagctgaggtgtttatcacactgctggatgtcaatgaccacccccctcagtttggaaagagcgttcagaagaagacgatggtgctagggaccccagtgaaaattgaggccatagacgaggatgcagaggaacccaacaacctggtggactattccatcacccatgcagagcccgccaacgtgttcgacatcaattcccacacgggggagatctggctcaagaattccatccgctccctggatgccctgcacaacatcacacctggaagggactgcctatggtccctagaggtgcaggccaaggaccggggctccccatccttcagcaccacagccttactcaagattgacatcacagatgctgagaccctctcccggagccccatggctgccttcctgatacagaccaaggacaaccccatgaaggccgtgggtgtgctggccggcaccatggccaccgtcgtggccatcactgtcctcatctccaccgccaccttctggcgcaacaagaagtctaacaaggtcctgccaatgcggcgggtgctccgcaagcggcccagccctgcgccccgcaccatccgcattgagtggctcaagtccaagagcaccaaagccgctaccaagttcatgctcaaagagaaacctcccaatgagaactgtaacaacaacagcccagaaagctctctgctcccgagagctccggctctccctccaccacccagmgtggsgcccagcactgkcgcagmccagwggaccgygcctaccgtctctgkctctctcactccgcagmcgacccaacccccgccaaaacccaaaactatgggaagccccgtccagwcaactctgatctctgagctcaagcaaaagtttgagaagaagagtgtgcacaacaaggcttacttctagtgtgtgccctatgaccccccatctttcctccgcccctgacccccaccaccctgctgctcggactatgctccccttcctctgctccttaaggtcactgacccctgttttgcacaatggtataatccccactgtcctcatctctaccgccaccttctggcgcaacaagaagttgagctctgacagggctctagtcagggccttgggcaagacattgggctctaggatgcaattggcaaatacgtccccgttactcaaatccttggcactactacaatgccctccattcttcagggctgagaattgacgagaagccagctcacccatcccagacctcacagtccctcaggttctactgggatctcatcatcatccttagtcaagcagcagggccctggccacgtggagcaacactgactagaatctggatcctgacgcctgcagctgagagcaggagcaggaaaaggaggctcarcactgtctcaggctggaggtcagcgaacctcgtgggctgtaggaaagcaaatgtaggtaaggggagagcaaggatgcacagaaaacacactgactgtgggactgtgccaggatgcatttggaaagatagagcattctgtctgggcagagactgtggaccctggtatgcccacgtgggacagaggacacagaggtggaagattgatcttgccaagagtgagggcagatgtctccagccaggactgccctgagccgcaaaatgtcaaagctggagctatagaggtagccctaaaggcaactagaagagcatcagggctgctctctgaggagctgccccaccagccatccttgaagagacaattcagggcagttgatgaatatcagggctgagatgtggggagacttccgtttttatccagctcttttgctcacatcgcgtaaccttgggaaagctgtttaaagtcgctgatcatcctcttcctcatctgtaaatgaagaaagtaggccctgtctacctcacatgcaggtctagggtgaggattgaagaaaatagtggtgatgagggctttaaccaagtgcaaagcggcatgaatgcaaagtatttttctgcagcccagttctgtgggtgcagctcttccagaaagtattaggagcctcacatctactctgccaagcgccccagcaggcactgtgctgggcttaggggctaccactggatgatggcattgccgtgactcacacacctctacttctgttcttccctcactccatccccgctaccgtcctggccagctaccgtcagagagaaccagagctccaagtctttaatttgccaagatgaagaaaatgagttctcaaggagggaatgctttgcttgaggccacacagcaggttggtagcaaagatcttgtctagccagggcagcccttatcagcttgtgacaaccttccccaggacagaagtcatacaaggcctctggggttaatacaaataggttgtgccctgctttaaggaacctgctatcaggaaatctacatgtgtgcacagagagagaaaagtagaacagttctttgcatttggctctacttactaacaacccctctagaatacattggtgatttcatttaaagagattgtatgcatttgtggctttcctgatttctgagtctgtgtttggaggtgttactgagatgtgccagtgtgcagaatccttgctggggtttctacagtccccaacgtgaacagtattaagcaagaggtggactcgagcaatccaggagcccagactgagcaaataagtactttccagcctgtgtttcaggagaggactgtgctggatcatgcttgccctccacagggaatacagcatccttacagcttgcatgcaatcaacctcttttgtaaatggaaaataaagtctgttacccaaaggccatgctgatcccctgctccctgctttcatttatgkttgctgacctgtggagaccagtctttctgacacacagtgaagctcaacttgcctcctggctgcttcagcaggtggatccattcttcgacccccagatgtgactctaaagaaggctgaaaatttttgtccaaattgccatgcagatatcttgaacagcaggacatttgcaggccttgtctactggacttttctcccaaacaggacaagcccaggcagggctgcatggagaggaatggaacctggagctagaattaattgcccactctcccaccctaccagtgcagcccggcaagggcaggaattgggaggcctagggtgggcatgaaagcttgggaagcactgtcgtctctcagacaggcgtcctaaagacctctaggctggaagcttgggcttgcaagtggatccgggaccgagggtggtctcttggacaaccccaggaacttggaccaaggcagagccaatcttgcaaactggccatggatggggaagtgcccggtagccagcatgagccacactaggaaagaggaggagggtgcagccaaacttaaggcaccggcaagtgttgtcagcactggaggagaccccgccagtggggtgaggccagccaagtccctgtgttacgaatggtgggccaaggggctgtctgctcggtcccagtaggacaggcagagctccaggctggcaccatggtaggcctccagggaaagagctgggaggcaggaatggcacactgggcaggcttgcccattcctggccctgagaatggagctgtagcctcatggacaataaatggatgtgacaccaaaaaaaaaaaaaaaaaaaaaaaa

SEQ ID NO: 32 - DNA, 538 bp, Homo sapiens
  SITE (500): n equals a,t,g, or c
  SITE (508): n equals a,t,g, or c
  SITE (533): n equals a,t,g, or c
  SITE (536): n equals a,t,g, or c
gttccattcaagatttattcttcttccaataactactacaaactggtgacagatggagccctggaccgagagcagacaccagaatacaatgtcaccatcgtagccactgacaggggcaagccgcctctttcttccagtagaagcatcaccttgtatgtcgctgacatcaacgacaacgccccagttttcgaccagacgtcctacgtggtccacgtggccgagaacaacccgccaggagcctccattgcgcaagtgagcgcctctgacccggatttggggctcaatggccacatctcctactctatagtggcgagtgacctagagcccctggcggtgtcgtcatacgtgtcagtgagcgcgcagagcggggtggtgttcgcgcagcgcgcctttgatcacgagcagctgcgcgccttcgcgctcacgctgcaggcccgcgaccacggctcgcccacgctcagcgccaacgtgagcctgcgcgtgttggtgggagaccgcantgacaacngcaccgcgggtgctgtacccagctntgngt

SEQ ID NO: 33 - DNA, 713 bp, Homo sapiens
  SITE (16): n equals a,t,g, or c
  SITE (668): n equals a,t,g, or c
  SITE (677): n equals a,t,g, or c
  SITE (690): n equals a,t,g, or c
gtttaaggtacccctnccggtaccggtccggaattcccgggtcgacccacgcgtccgccctkycgatkgcttcagtgttgaccccaacaatgggaccctgttcacaatagtgggaacagtggccttgggccatgacgggtcaggagcagtggatgtggtgctggaagcacgagaccacggggctccaggccgggcagcacgagccacagtgcacgtgcagctgcaggaccagaacgaccacgccccgagcttcacattgtcacactaccgtgtggctgtgactgaagacctgccccctggctccactctgctcaccctggaggctacagatgctgatggaagccgcagccatgccgctgtggactacagcatcatcagtggcaactggggccgagtcttccagctggaacccaggctggctgaggctggggagagtgctggaccaggcccccgggcactgggctgcctggtgttgcttgaacctctagactttgaaagcctgacacagtacaatctaacagtggctgcagctgaccgtggggcagccaccccaaagctcagtcgtccagtcactgtcactgtactagatgtcaatgacaacccamctgctttacccgagcatyctamcgtgtgacagtacctgaggacacacctgttgggagctgaanttggttgcntgtagaggccctntgacgcttgacccctgggccctt

SEQ ID NO: 34 - DNA, 728 bp, Homo sapiens
  SITE (689): n equals a,t,g, or c
  SITE (698): n equals a,t,g, or c
  SITE (701): n equals a,t,g, or c
gccagatctccgcggctgacctggactcccctgccagcccaatcagatactccatcctcccccactcagatccggagcgttgcttctctatccagcccgaggaaggcaccatccatacagcagcacccctggatcgcgaggctcgcgcctggcacaacctcactgtgctggctacagagctcgacagttctgcacaggcctcgcgcgtgcaagtggccatccagaccctggataagaatgacaatgctccccagctggctgagccctacgatacttttgtgtgtgactctgcagctcctggccagctgattcaggtcatccgggccctggacagggatgaagttggcaacagtagccatgtctcctttcaaggtcctctgggccctgatgccaactttactgtccaggacaaccgagatggctccgccagcctgctgctgccctcccgccctgctccaccccgccatgccccctacttggttcccatagaactgtgggactgggggcagccggcgctgagcagcactgccacagtgactgktagtgtgtgccgctgccagcctgacggctctgtggcatcctgcttgccctggtggtgctcttcgtggccctgcggcggcagaagcaagaagcactgatggtactggaggaggaggacgtccgagagaacatyatcacctacgacgacnagggcggcngcnaagaaggacaccgaggcctttcgacat

SEQ ID NO: 35 - DNA, 1575 bp, Homo sapiens
ggcacgaggttgaaatgcttttctgctagactggcaacatgttttgattcttctcaaataactcgcaagctcttgtgaagcacaacggcctaccttgtcctgaagaaaacatactctaaggcccacagatgattaaacccagccatttatgtgacaatagcatttttatttttcttatcaagatctgggtatttgatccacacaatggtaaagattcccatgttagccaagatctaaatgattcaaactgatgatactctctgcagaagaggtgactataaacgcagcccctgtgatgccaactggacatattatggagatagctgctatgggttcttcaaacacaacttgacatggaaagagagtgagcagtactgcactgacatgaaggctactctcctgaagactgacaaccagaacattctgtggatagaagtcaagggctccaatgtctcccaagacgaaagaatcccaagtctcatttggaggaatgctatcactaactaggattcctggagctaaaacattatgagcatgctgtcttgtgatggtgatttcatgtgttttctgcatgggattattaacggcatccattttcttgggcgtcaagtgtgtccaccattgcgatgcagcagcaagaaaaactcatccaacaagagagggcactgctaaactttacagaatggaagagaagctgtgcccttcagatgaaatattgccaagccttcatgcaaaactcattaagttcagcccataacagcagtccttgtccaaacaattggattcagaacagagaaagttgttactatgtctctgaaatttggagcatttggcacaccagtcaagagaattgtttaaaggaaggttccacgctgctacaaatagagagcaaagaagaaatggattttatcactggcagcttgaggaagattaaaggaagctatgattactgggtggggttgtctcaggatggacacagcggacgctggctttggcaagatggctcctctccttctcctggcctgttgccagcagagagatcccagtcagctaaccaagtctgtggatacgtgaaaagcaattcccttctttcgtctaactgcagcacgtggaagtattttatctgtgagaagtatgccgttgagatcctctgtctgaaaagaaattgtgttcaaagtgttctattacactgttatttggagcatgccattggaaaacccacccccaccccccctttaaaaaacagaacagtaaaccaaaatgtgggccatgaaattagcaacctgggactcaataatacacttgggaatattcttccacaccgtccagatttcatttgatgttgttcacattgcaagagtaaaacttatttagagctacagaagacaaaaccctgaagagttaagaacaaacgcaaggaaataatttttattgtttaaagcccggaatgactgtaactttcacacaaggtacgcatctatgtttttgggggaggtgatgtagttacagctgactaatatttttaaaataaataaataaatttggcctttaaaactcacaaaaaaaaaaaaaaaa

SEQ ID NO: 36 - DNA, 1474 bp, Homo sapiens
ccttttttttttttttttttttttttgtcatccttctaaacatttaattcagcaattcctacattgtcatgacaaaaatgaaacttgctgagggttacagagttctaatcagaaataacaacttaaaaatctcacaaaagctctacgtaagcctgtcgtaagggctgcactgtattccgaacatttattttgaaaacaattgtcaaaatgtaaaatctccagcaccctcaacatgatgtagccttttggctcattctatacgtttgtgatcatctttgtaactccaagttttggaatatgaaaaagcatgatggcaaagaataataacaagacatttgtttctccatgccctgcccaagacttgatgcaccgtgcgtgccccattaagcggtggggtggtccaacacgtcagttagtaaagcagcacttgctggtgctctgcctgctctgaattcagttccgaggctgtgagttgaactctgtacaaatgttctggatgatcctggggacatactgatggaggttgtcaaactcgtccacaaagaaggagtggtctctggcggggtgagtggcaatgacttctagctcctcttgggcagcccaggcaacgcctatcgcataggtgatcactcccttcagatgggcaccatggctgggatccggacgtcgtcgtaggacctcccgtcggtgatgaggatcattaacttcctcttgttgggcttggacttcttgaagagctgctccagggcgaagttgatggcagcccccgtgctggtgccaccactccagtagcccaccctcttgatggcgttgaggatgtcaggcttgctgctgtacttgtcgaacccaaactccagccgctgttcgtaggtgtactgcacggccccgatgcgcgtgtccgtgtcggaaatctcaaactctttggtgaggttggtcacaaaytgragacggtcgaaagttgcccgtccccacactgctgaagccgtcgatgacgaagccaatgtcagccgagttcaagcaggtcttgctgcaggccaggcggtcagtgtcgcagacccgcttcaccagaggctgcagggtcttgtggaggccaaaccagctctgcacgtggagcgagtagaagccgtttgttctgcacacggccttgtttgcaaagttgggctccaccacatactgcttctcattttcagcagcaccttcaatggtgatgaagaaaatgttgattcctgactctctcgcaagtcttgaagcctcctccactttgtccgtgggccagccatccaccatcaccaccaccacattgggagccccgcttctgtttccattggctttggaaaagaagttcttggtcacaaaggagatggcccgacctacattagaaagtcctcctctctgagtaattttctctatggctgtcttcagatctcgagaattcgtgtgtgtcttgaggttaaagtgagtagcagctcgtgcc

SEQ ID NO: 37 - DNA, 618 bp, Homo sapiens
  SITE (48): n equals a,t,g, or c
  SITE (65): n equals a,t,g, or c
  SITE (556): n equals a,t,g, or c
  SITE (588): n equals a,t,g, or c
  SITE (598): n equals a,t,g, or c
gcgcgcctgccggtcgacactagtggatccaaagaattcggcacgagntcaggcgcagctgcwknaccacgcgcgcggagcttggggaggcgcargcgaagctgatggagcaggagagcgccctgcggraactgcgtgagcgcgtgacccagggcttggctgaagccggcagggccgtgaggacgtccgcactgagctgttccgggcgctggaggccgtgagctccagaacaactcctgcgagccgtgccccacgtcgtggctgtccttcgagggctcctgctactttttctctgtgccaaagacgacgtgggcggcggcgcaggatcactgcgcagatgccagcgcgcacctggtgatcgttgggggcctggatgagcagggcttcctcactcggaacacgcgtggccgtggttactggctgggcctgagggctgtgcgccatctgggcaaggttcagggctaccagtgggtggacggatctctctcagcttcaaccactgggaaccagggagagcccaatgacgcttgggggcgcgaaaaactgtgttcatgangctggcacacgggggttttggaacgacggcancgtgtgacancgaaaaaggacggttggatc

SEQ ID NO: 38 - DNA, 1096 bp, Homo sapiens
ccacgcgtccgcggacgcgtgggcggacgcgtgggcggaaatcacttatgctgaagtgaggttcaaaaatgaattcaagtcctcaggcatcaacacagcctcttctgcagcttccaaggagaggactgcccctctcaaaagtaataccggattccccaagctgctttgtgcctcactgttgatatttttcctgctattggcaatctcattctttattgcttttgtcattttctttcaaaaatattctcagcttcttgaaaaaaagactacaaaagagctggttcatacaacattggagtgtgtgaaaaaaaatatgcccgtggaagagacagcctggagctgttgcccaaagaattggaagtcatttagttccaactgctactttatttctactgaatcagcatcttggcaagacagtgagaaggactgtgctagaatggaggctcacctgctggtgataaacactcaagaagagcaggatttcatcttccagaatctgcaagaagaatctgcttattttgtggggctctcagatccagaaggtcagcgacattggcaatgggttgatcagacaccatacaatgaaagttccacattctggcatccacgtgagcccagtgatcccaatgagcgctgcgttgtgctaaattttcgtaaatcacccaaaagatggggctggaatgatgttaattgtcttggtcctcaaaggtcagtttgtgagatgatgaagatccacttatgaactgaacattctccatgaacaggtggttggattggtatctgtcattgtagggatagataataagctcttcttattcatgtgtaagggaggtccatagaatttaggtggtctgtcaactattctacttatgagagaattggtctgtacattgactgattcactttttcataaagtgagcatttattgagcattttttcatgtgccagagcctgtactggaggcccccattgtgcacacagggagagaacatgagtctctcttaatttttatctggttgctaaagaattatttaccaataaaattatatgatgtggtgtcaaaaaaaaaaaaaaaaaaaaaaaaaaaaaaaaaaaa

SEQ ID NO: 39 - DNA, 988 bp, Homo sapiens
ccacgcgtccggaagattttaatgtattctcatctgtaaaatcatatccctgtagttcgaattgacaatgaaatataaaaatggcaactaattggttatttcataagtgtccttaagatgaatggtgttcacactaaaagagtgaattggtatgctatgaacctcatggtactaatcttttatttccaggggttctttccagcccttgtcctcctaattggattatatatgagaagagctgttatctattcagcatgtcactaaattcctgggatggaagtaaaagacaatgctggcaactgggctctaatctcctaaagatagacagctcaaatgaattgagtctcactctgttgcccaagctagagtgcagtgaagccgcgacatcccaggctcaagtgatcctcccacctcagcttcctgagtaggtaggactacagggtgcaccaccacactcgtctaatgtttttttgtatttttcatagagacgaggtttctccatatcatctgggctggtctcaaaatcctgggcacaagcgatctgcctacctcgatctcccagtgttgggattacaggtgtaagccaccacacttggccaaaattcatttttaatatctctataattataatcatagcatgccttaagcacataaagtgcatagtatatgcttttatttttaactaatttaaaaaactgtgtttcgccttaaaacaaatcctttcaaacatactccatgtatgcatgactacaataatcaggacactacccatttttgtgagtttgtatttcaatttttaaatatggtggaagtaaagtagaaaattcttctccttgtcatcataattatcaagaaaaatggcaacaatgataatatatgtttagaaattatttactctttgcaagatactgggaaaggcaaagagggttaaaacataaccctactatcacaggacacatataatcttttaagtaaaaaaaaaaaaaaa

SEQ ID NO: 40 - DNA, 1468 bp, Homo sapiens
aaagaacccaaagtcagcttctccagatggtcctgcaaggctggaagttcaatggtggaagcttatattatttttctagtgtcaagaagtcttggcatgaggctgagcagttctgcgtgtcccagggagcccatctggcatctgtggcctccaaggaggagcaggcatttctggtagagttcacaagtaaagtgtactactggatcggtctcactgacaggggcacagagggctcctggcgctggacagatgggacaccattcaacgccgcccagaacaaagcgtgagtctagccaccatctggcgctgtcccaggcactgtctttggtggacctagctacacactgtgtgtcccttcccagtaagtggtagtgttgtgtgtatatgtgtgtgtgacgtgtgtggtgtgtatgtggtgtatgtgtggtgtgtgtgccatgtatgtggcatgtgtaatgcatgtggtgtgcgaggtgtatgtgtggtatgtgtgtgatgtgtgtgcgtttggacacacaggtgtggtcatcgctctcacctggactcctccacagagggtcattaggaaaggacaggtcctgaggctggcatgcagccagtgagtgggtctttctgtttttttccccctgccctactcaggcctggttccaagggatcctgcccactcagaaagtatattattgtgaattctgggatgggagcttgcagcttcatagacacccctccctgtccctggatcctcagtaactaagagcaacctgagcacagacaccctcagggtactccttctcccagccctgtcctcatcctagggccactaggggatgaaggacccatctcaagtcagctccctagactcatcccatgtcagctccctaggagccacagcaccaggaagggatgctgccttcatctaacagtataaagccctgttgtcttcgggttttgggaaaagaatcagtctgacaactggcggcacaagaatgggcagactgaagactgtgtccaaattcagcagaagtggaatgacatgacctgtgacaccccctatcagtgggtgtgcaagaagcccatgggccagggtgtggcctgagggcaggccagagctgaggggctgctcctgcttgccaatactgaccctcctcctcgatgccttcggagcctctgagctctgcttgttctctgggaccttccgttggccttgtggacttcctgccttgttctttgattcagccctttcaaacatgcttacctcgagtgacccagtgacatcagtggcttctcaagggaagagccttgctgtgcccctgtagcctcagcacccagcacaggcctgtcagacagcaggtcctcaataaatactcgctggatcaacaaaaaaaaaaaaaaaaaaaaaaaaaaaaaaaaaaaaaaaaaaaaaaaaaaaaaaaaaaaaaaaaaaaaaaaaaaaaaaaaaaaaaaaaaaaaa

SEQ ID NO: 41 - DNA, 432 bp, Homo sapiens
  SITE (192): n equals a,t,g, or c
  SITE (337): n equals a,t,g, or c
  SITE (412): n equals a,t,g, or c
  SITE (415): n equals a,t,g, or c
  SITE (421): n equals a,t,g, or c
gcawkaagagctgggtccaggcccagggggcytsccaggagctgggggcccagctgttgagcctggccagctacgaggaggagcactttgtggccaacatgctcaacaagatcttcggtgaatcagaacccgagatccacgagcagcactggttctggatcggcctgaaccgtcgggatcccagagggggtncagagttggcgctggagsgacggcktagggttctcttaccacaatttcgaccggagccggcacgacgacgacgacatccgaggctgtgcggtgctggacctggcctccctgcatgggtggccatgcatgcgacacacagytggantgggatytgcaaatccccagagttaagggactttcgggaacccgacgacagccttcaaggcgacgggaatggctncgnttccangaaggcgatta

SEQ ID NO: 42 - DNA, 1210 bp, Homo sapiens
ggcacgagcacaagaggagttacttgttccagcctcctgtgtggactgctttcctatcaaagcaccttagacatgcacgaggaagaaatatacacctctcttcagtgggatagcccagcaccagacacttaccagaaatgtctgtcttccaacaaatgttcaggagcatgctgtcttgtgatggtgatttcatgtgttttctgcatgggattattaacagcatccattttcttgggcgtcaagttgttgcaggtgtccaccattgcgatgcagcagcaagaaaaactcatccaacaagagagggcactgctaaactttacagaatggaagagaagctgtgcccttcagatgaaatattgccaagccttcatgcaaaactcattaagttcagcccataacagcagtccttgtccaaacaattggattcagaacagagaaagttgttactatgtctctgaaatttggagcatttggcacaccagtcaagagaattgtttaaaggaaggttccacgctgctacaaatagagagcaaagaagaaatggattttatcactggcagcttgaggaagattaaaggaagctatgattactgggtggggttgtctcaggatggacacagcggacgctggctttggcaagatggctcctctccttctcctggcctgttgccagcagagagatcccagtcagctaaccaagtctgtggatacgtgaaaagcaattcccttctttcgtctaactgcagcacgtggaagtattttatctgtgagaagtatgcgttgagatcctctgtctgaaagaaattgtgttcaaagtgttctattacactgttatttggagcatgccattggaaaacccacccccaccccccctcaaaaaaacagaacagtaaaccaaaatgtgggccatgaaattagcaacctgggactcaataatacacttgggaatattcttccacaccgtccagatttcatttgatgttgttcacattgcaagagtaaaacttatttagagctacagaagacaaaaccctgaagagttaagaacaaacgcaaggaaataatttttattgtttaaagcccggaatgactgtaactttcacacaaggtacgcatctatgtttttgggggaggtgatgtagttacagctgactaatatttttaaaataaataaataaatttggcctttaaaaaaaaaaaaaaaaaaaaa

SEQ ID NO: 43 - DNA, 2166 bp, Homo sapiens
ggcacagagcagccctcaaggccgacgggaatggctgcgcttccaggaggccgagtacaagttctttgagcaccactccacgtgggcgcaggcgcagcgcatctgcacgtggttccaggccgagctgacctccgtgcacagccaggcggagctagacttcctgagccacaacttgcagaagttctcccgggcccaggagcagcactggtggatcggcctgcacacctctgagagcgatgggccgcttcaratggacagatggttccattataaacttcatctcctgggcaccaggcaaacctcggcctgtcggcaaggacaagaagtgcgtgtacatgacagccagccgagaggactggggggaccagaggtgcctgacagccttgccctacatctgcaagcgcagcaacgtcaccaaagaaacgcagcccccagacctgccaactacagccctggggggctgcccctctgactggatccagttcctcaacaagtgttttcaggtccagggccaggaaccccagagccgggtgaagtggtcagaggcacagttctcctgtgaacagcaagaggcccagctggtcaccatcacaaaccccttagagcaagcattcatcacagccagcctgcccaatgtgacctttgacctttggattggcctccatgcctcgcagagggacttccagtgggtggagcaggagcctttgatgtatgccaactgggcacctggggagccctctggccctagccctgctcccagtggcaacaaaccgaccagctgtgcggtggtcctgcacagcccctcagcccacttcactggccgctgggacgatcggagctgcacggaggagacccatggcttcatctgccagaagggcacggacccctccctgagcccgtccccagcagcgctgccccccgccccgggcactgagctctcctacctcaacggcaccttccggctgcttcagaagccgctgcgctggcacgatgccctcctgctgtgtgagagccacaatgccagcctggcctacgtgcccgacccctacacccaggccttcctcacgcaggctgcccgagggctgcgcacgccgctctggattgggctggctggcgaggagggctctcggcggtactcctgggtctcagaggagccgctgaactacgtgggctggcaggacggggagccgcagcagccggggggctgtacctacgtagatgtggacggggcctggcgcaccaccagctgtgacaccaagctgcagggggctgtgtgtggggttagcagtgggccccctcctccccgaagaataagctaccatggcagctgtccccagggactggcagactccgcgtggattcccttccgggagcactgctattctttccacatggagctgctgctgggccacaaggaggcgcgacagcgctgccagagagcgggtggggccgtcctgtctatcctggatgagatggagaatgtgtttgtctgggagcacctgcagagctatgagggccagagtcggggcgcctggctgggcatgaacttcaaccccaaaggaggcactctggtctggcaggacaacacagctgtgaactactccaactgggggcccccgggcttgggccccagcatgctgagccacaacagctgctactggattcagagcaacagcgggctatggcgccccggcgcttgcaccaacatcaccatgggtgtcgtctgcaagcttcctcgtgctgagcagagcagcttctccccatcagcgcttccagagaacccagcggccctggtggtggtgctgatggcggtgctgctgctcctggccttgctgaccgcagccctcatcctttaccggaggcgccagagcatcgagcgcggggcctttgagggtgcccgctacagccgcagcagctccagccccaccgaggccactgagaagaacatcctggtgtcagacatggaaatgaatgagcaacaaagtatgcggcccatcctggtgcgacagcgtgggacaatgtgaacatggactcgaagacatggccctttctctgtagttgattttttaaatgtgccattattgtttttaaaaaaaaaggaaaaaagaaaagcaaacaaataaaacacctttaagaggcttgaaagagaaaaaaaaaaaaaaaaaa

SEQ ID NO: 44 - DNA, 857 bp, Homo sapiens
tcgacccacgcgtccggttgcactggtataaaatcttactgggaatatctggaaccgtgaatggtattctcactttgactttgatctccttgatcctgttggtttctcagggagtattgctaaaatgccaaaaaggaagttgttcaaatgccactcagtatgaggacactggagatctaaaagtgaataatggcacaagaagaaatataagtaataaggacctttgtgcttcgagatctgcagaccagacagtactatgccaatcagaatggctcaaataccaagggaagtgttattggttctctaatgagatgaaaagctggagtgacagttatgtgtattgtttggaaagaaaatctcatctactaatcatacatgaccaacttgaaatggcttttatacagaaaaacctaagacaattaaactacgtatggattgggcttaactttacctccttgaaaatgacatggacttgggtggatggttctccaatagattcaaagatattcttcataaagggaccagctaaagaaaacagctgtgctgccattaaggaaagcaaaattttctctgaaacctgcagcagtgttttcaaatggatttgtcagtattagagtttgacaaaattcacagtgaaataatcaatgatcactatttttggcctattagtttctaatattaatctccaggtgtaagattttaaagtgcaattaaatgccaaaatctcttctcccttctccctccatcatcgacactggtctagcctcagagtaacccctgttaacaaactaaaatgtacacttcaaaatttttacgtgatagtataaaccaatgtgacttcaaaaaaaaaaaaaaaa

SEQ ID NO: 45 - DNA, 1122 bp, Homo sapiens
ccgggtcgacccacgcgtccggttctgcccaaacatctcaacttacatttaaagattattcagtgacgttgcactggtataaaatcttactgggaatatctggaaccgtgaatggtattctcactttgactttgatctccttgatcctgttggtttctcagggagtattgctaaaatgccaaaaaggaagttgctaaaagtgaataatggcacaagaagaaatataagtaataaggacctttgtgcttcgagatctgcagaccagacagtactatgccaatcagaatggctcaaataccaagggaagtgttattggttctctaatgagatgaaaagctggagtgacagttatgtgtattgtttggaaagaaaatctcatctactaatcatacatgaccaacttgaaatggcttttatacagaaaaacctaagacaattaaactacgtatggattgggcttaactttacctccttgaaaatgacatggacttgggtggatggttctccaatagattcaaagatattcttcataaagggaccagctaaagaaaacagctgtgctgccattaaggaaagcaaaattttctctgaaacctgcagcagtgttttcaaatggatttgtcagtattagagtttgacaaaattcacagtgaaataatcaatgatcactatttttggcctattagtttctaatattaatctccaggtgtaagattttaaagtgcaattaaatgccaaaatctcttctcccttctccctccatcatcgacactggtctagcctcagagtaacccctgttaacaaactaaaatgtacacttcaaaatttttacgtgatagtataaaccaatgtgacttcatgtgatcatatccaggatttttattcgtcgcttattttatgccaaatgtgatcaaattatgcctgtttttctgtatcttgcgttttaaattcttaataaggtcctaaacaaaatttcttatatttctaatggttgaattataatgtgggtttatacattttttacccttttgtcaaagagaattaactttgtttccaggcttttgctactcttcactcagctacaataaacatcctgaatgttttcttaaaaaaaaaaaaaaa

SEQ ID NO: 46 - DNA, 833 bp, Homo sapiens
  SITE (816): n equals a,t,g, or c
gaccgcacggggtatggtccccgggtccgagggcccggcccgcgccgggagcgtggtggccgacgtggtgtttgtgattgagggtacggmcaacctgggaccctacttcgaggggctccgcaagcactacctgctcccggccatcgagtattttaatggtggtcctcctgctgagacggacttcgggggagactatggggggacccagtacagcctcgtggtgttcaacacagtggactgcgctcccgagtcctacgtacaatgtcacgctcccaccagcagcgcctatgagtttgtcacctggctcgatggcattaagttcatgggcgggggtggtgagagctgcagcctcatcgcggaaggactcagcacagccttgcagctgtttgatgacttcaagaagatgcgcgagcagattggccagacgcaccgggtctgcctcctcatctgcaactcacccccatacttgttgcctgctgttgagagcaccacgtactctggatgcacaactgagaatcttgtgcarcarawtggggarcgggggatccacttytccattgkgkctccccggaagctgcctgcgcttcggcttctgtttgagaaggcagcccccccggccttgytggakccgctgcarcctccgacagatgtgagccaggacccgaggcacatggkgctggttcggggactcgtgctgcctgttgggggtggctcagccccaggccccctccagtcaaagcagccagcccccctgcctcccgccgcaccctcaggtgccactctctcagcagccccccagcagcctctgccccccgngcccccgcagtaccagg

SEQ ID NO: 47 - DNA, 2239 bp, Homo sapiens
  SITE (545): n equals a,t,g, or c
  SITE (1674): n equals a,t,g, or c
  SITE (1676): n equals a,t,g, or c
  SITE (2014): n equals a,t,g, or c
  SITE (2042): n equals a,t,g, or c
  SITE (2165): n equals a,t,g, or c
  SITE (2188): n equals a,t,g, or c
  SITE (2218): n equals a,t,g, or c
gcacaagtgtgcatgtgtggctcggaggcttcagctggggccccgccctcgtccccaggcgcacactgacacacgcagcccagacccggcccgagcgggctcctgccctcggcgtggcttctctccagccgggagtcccagggccagctagcctcctcccctaaaggggacggcctgtcagcgcagtgccagagtccagcaccgggaggaaagtttcggagtgcggagggagttggggccgccggaggagaagagtctccactcctagtttgttctgccgtcgccgcgtcccagggaccccttgtcccgaagcgcacggcagcggggggracttcagccctccaggcggggtgggttccaggtccgggtccgaggcgggcgctggaggctcggccccaggccggagaggaactcctttcgcgagctgtcgccgtgggcccgcattgtctgcaggaactctccggaatcgggagggggaggactggatcgcgcttccactgggattcgtcaagagttccggcggcaactgcggcggtggcggagantccctttgtcctctcaggacctccctctctccctccctgtcagctggtgggtcccgctgccgcagccgggcgtctcagctgctcgccgccccccaccccagagtgcgtgcmgggtgactcccgccacctttgcgaccctcctgagcttaggggactgcgagcgggagggagtctcaggcccccggccgcargatggtggcggacggtccccggcccgcagccccgggagctggctgttccccgggctgtggctgttggtgctcagcggtcccggggggctgctgcgcgcccaggagcagccctcctgcagaagagcctttgatctctacttcgtcctggacaagtctgggagtgtggcaaataamtggattgaaatttataatttcgtacagcaacttgcggagagatttktgagccctgaaatgagattatctttcattgtgttttcttctcaagcaactattattttgccattaactggagacagaggcaaaatcagtaaaggcttggaggatttaaaacgtgttagtccagtaggagagacatatatccatgaaggactaaagctagcgaatgaacaaattcagaaagcaggaggcttgaaaacctycagtatcataattgctctgacagatggcaagttggacggtctggtgccatcatatgcagagaaagaggcaaagatatccaggtcacttggggctagtgtttattgtgttggtgtccttgattttgaacaagcacagcttgaaagaattgctgattccaaggagcaagttttccctgtcaaaggtggatttcaggctcttaaaggaataattaattctatactagctcagtcatgtactgaaatcctagaattgcagccctcaagtgtctgtgtgggggaggaatttcagattgtcttaagtggaagaggattcatgctgggcagtcggaatggcagtgttctctgcacttacactgtaaatgaaacatatacaacgagtgtaaaaccagtaagtgtacagcttaattctatgctttgtcctgcacctatcctgaataaagctggagaaactcttgatgtttcagtgagctttaatggaggaaaatctgtcatttcaggatcattaattgtcacagccananaatgttctaacgggatcgcagccatcattgttattttggtgttactgctactcctggggatcggtttgatgtggtggttttggcccctttgctgcaaagtggytattaaggatcctccaccaccacccccccctgcaccaaaagaggaggaagaagaacctttgcctactaaaaagtggccaactgtggatgcttcctattatggtggtcgaggggttggaggaattaaaagaatggaggttcgttggggtgataaaggatctactgaggaaggtgcaaggctagagaaagccaaaaatgctgtggtgaagattcctgaagaaacagaggaacccatnaaggctaaaacaacttgacccaacccanacaaccaagcttcttagacaaaatggtacacccccaattaagggtcggcttgatgctctctggctttgttgaggcgcagtatgaccgggtttctttgatgcgacctcaggaaggagataaggncggtgcataaacttcttccgagnttcatctcaataaaagggaagcaggaagancaagaagtaccaaaatggcca

SEQ ID NO: 48 - DNA, 2125 bp, Homo sapiens
ccgccccccgccgccgctgcacaccggacccagccgccgtgccgcgggccatggacctgcccaggggcctggtggtggcctgggcgctcagcctgtggccagggttcacggacaccttcaatatggacaccaggaagccccgggtcatccctggctccaggaccgccttctttggctacacagtgcagcagcacgacatcagtggcaataagtggctggtcgtgggcgccccactggaaaccaatggctaccagaagacgggagacgtgtacaagtgtccagtgatccacgggaactgcaccaaactcaacctgggaagggtcaccctgtccaacgtgtccgagcggaaagacaacatgcgcctcggccttagtctcgccaccaaccccaaggacaacagcttcctggcctgcagccccctctggtctcatgagtgtgggagctcctactacaccacagggatgtgttcaagagtcaactccaacttcaggttctccaagaccgtggccccagctctccaaaggtgccagacctacatggacatcgtcattgtcctggatggctccaacagcatctacccctgggtggaggttcagcacttcctcatcaacatcctgaaaaagttttacattggcccagggcagatccaggttggagttgtgcagtatggcgaagatgtggtgcatgagtttcacctcaatgactacaggtctgtaaaagatgtggtggaagctgccagccacattgagcagagaggaggaacagagacccggacggcatttggcattgaatttgcacgctcagaggctttccagaagggtggaaggaaaggagccaagaaggtgatgattgtcatcacagatggggagtcccacgacagcccagacctggagaaggtgatccagcaaagcgaaagagacaacgtaacaagatatgcggtggccgtcctgggctactacaaccgcagggggatcaatccagaaacttttctaaatgaaatcaaatacatcgccagtgaccctgatgacaagcacttcttcaatgtcactgatgaggctgccttgaaggacattgtcgatgccctgggggacagaatcttcagcctggaaggcaccaacaagaacgagacctcctttgggctggagatgtcacagacgggcttttcctcgcacgtggtggaggatggggttctgctgggagccgtcggtgcctatgactggaatggagctgtgctaaaggagacgagtgccgggaaggtcattcctctccgcgagtcctacctgaaagagttccccgaggagctcaagaaccatggtgcatacctggggtacacagtcacatcggtcatgtcctccaggcaggggcgggtgtacgtggccggagccccccggttcaaccacacgggcaaggtcatcctgttcaccatgcacaacaaccggagcctcaccatccaccaggctatgcggggccagcagataggctcttactttgggagtgaaatcacctcggtggacatcgacggcgacggcgtgactgatgtcctgctggtgggcgcacccatgtacttcaacgagggccgtgagcgaggcaaggtgtacgtctatgagctgagacagaacctgtttgtttataacggaacgctaaaggattcacacagttaccagaatgcccgatttgggtcctccattgcctcagttcgagacctcaaccaggattcctacaatgacgtggtggtgggagcccccctggaggacaaccacgcaggagccatctacatcttccacggcttccgaggcagcatcctgaagacacctaagcagagaatcacagcctcagagctggctaccggcctccagtattttggctgcagcatccacgggcaattggacctcaatgaggatgggctcatcgacctggcagtgggagcccttggcaacgctgtgattctgtggtcccgcccagtggttcagatcaatgccagcctccactttgagccatccaagatcaacatcttccacagagactgcaagcgcagtggcagggatgccacctgcctggccgccttcctctgcttcacgcccatcttcctggcaccccatttccaaacaacaactgttggcatcag

SEQ ID NO: 49 - DNA, 2531 bp, Homo sapiens
  SITE (2524): n equals a,t,g, or c
  SITE (2528): n equals a,t,g, or c
gcccagacagaagagaccacggtaaagatcagctgacggcctctgtgggaacaaagacagggaaaggggaaatgagttcaccagaaaccaacaggcagcacaggaggtggtaaacccgaaaaagaaaatgaagaaaaagaaatacgtgaattctggcacagtcaccctgctttcctttgctgtggagtcagagtgcaccttccttgactacatcaaaggagggacccagatcaacttcactgtggccattgatttcactgcctccaatgggaacccctcacagtccacatccctgcactacatgagcccctaccagctgaacgcctacgcgctggcgctgactgccgtcggagagatcatccagcactacgacagtgacaagatgttccctgccctgggcttcggggccaagctgcccccggatggcagagtgtcccacgagttcccactgaatggcaaccaggagaacccctcatgctgcggcatcgacggcatcctggaggcctaccaccgcagcctgcgcactgtgcagctgtacggccccaccaactttgcccccgtggtcacccacgtggccaggaatgcagcggccgtgcaggatggctcccagtactcggtgctgctcatcattactgatggggtcatctcggacatggcgcagaccaaggaggccattgtcaacgctgccaagctccccatgtccatcattatcgtcggcgtgggccaggcagagttcgacgccatggtggagctggatggcgacgacgtgcggatctcctcccgggggaagctggctgaacgcgacatcgtccagtttgtacccttccgggactacgtggaccgcacaggcaaccacgtgctgagcatggcccgcctggcccgagacgtgctggcagagatccctgaccaactggtgtcctacatgaaggcacagggcattcgcccgcgtcccccacccgcagcaccaacccactcgccctcgcagtccccagcccgcacgccccctgcgtcccccctgcacacgcacatctgaacctggtctcagcaggcaggtggctggggcctgggagaggccaggtgaatgggaggccagggccccagactccccgaagttggcctgcccggcctttgggacatctgtgtgcctgggaggctgccagggggtggggcttctgaagacccctcctcaatttcttggcctcacttattgcccaaacccagggagttaggggggtacgggtgaaagaggggtacacagggacccagcccttctcttcttccccaatacctggctctaacccagccaggaaggtgtaaacaataagggtgattggggtccctgtcgcccacccccggcaatcctatttgcttacctgtcaccctgaagcctgggcttggcctcctccagccccccatctccgtcccatcctcccatggtgtctactcctgtccctgagccccgccctgtggtctatcctgtgcccgatttccagtgaaccccatgaagctgatgggtttgcaggaaggcctgaacatgtgcaccctcccagggacactggatgcgytgggagccccggggaccccatggggtgctgtaatcatggaccgtaggccatgtgatgggcctgaagtggaggctgctcagcacagagccctttctggtgcctctcgaactcagtacgatgcaagttctagacacacagatggcctgtggaggcctctccctggtgtgggcccacaggtacttccatggttgactcctggcttcaggaatcccttcctccctccagaggcttcccagggccctcggtgcccacgcctctgcccatctggaggcctgagtaaggagtggctcagccccacgttcccacactgctcctgctctttgccctgtatcccatgaggctaggagacaggagtcctgggtttgagccctgcctccccccactgcctaatgtgggaacccaagcaaggcccttctaccttttgggcctcagtttccatgtctgtaccacaagagggttgaccagatggccccaggttttcctttaggtctgacatcctgagggtcattcatcccatgcccagytccccccatcctactcctaacagatgtgaccctacttgaggccgccttggcttttgggtcaccctgtctcawcccatcaccccaaacataccctagtccttcagcctggggctctggcwtctgagcccgagctcctgcccctgctgtgggaaaggtggggaagaaggkgatctccctcccgggcccacccagctgcccagcctttgcccactcggggagcagatcatgcatgccaatccctgttgccgcatggagctcctcagcccactgacctctccgtgcctggtgcaggccaggcccccgtcttccgcctgcctctgcttccccgtcatgcatggtrrwrrarwttctacggtgtctggttctgtgcccgtctctgagacagtctctgtgtggaatttgccttaaactgaagtaaatttggtcttttagtanaaanaac

SEQ ID NO: 50 - DNA, 689 bp, Homo sapiens
  SITE (63): n equals a,t,g, or c
gcgccagggccggggcgggacgggacggaaaactggcggcttggtttgttcagcgcgtcgcgntcatggctctcgtttcaggcctccacggtgtgcacctggagtcaggagcgcgcttgtgcgtacagttcggttcagttactaaaagatgtaactgaactgcagatccttggtgaaatatctttcaacaaatctctatatgagggactgaatgcagagaaccacagaactaagatcactgtcgtcttcctgaaagatgagaagtaccattctttgcctatcatcattaaaggcagcgttggtggacttctggtgttgatcgtgattctggtcatcctgttcaagtgtggcttttttaaaagaaaatatcaacaactgaacttggagagcatcaggaaggcccagctgaaatcagagaatctgctcgaagaagagaattaggacctgctatccactgggagaggctatcagccagtcctgggacttggagacccagcatcctttgcattactttttccttcaggatgatctagagcagcatggagctgttggtagaatattagtttttaaccatacattgtcccaaaagtgtctgtgcattgtgcaaaaagtaaacttaggaaacatttggtattaaataaatttacacttttctttgcaaaaaaaaaaaaaaaaaaaaaaaaaaaaaa

SEQ ID NO: 51 - DNA, 536 bp, Homo sapiens
aaaaatattatactttttttgggtctccataaaggttcacctaaggatcatgaacgtaatggatgcagattatgtaaaagtgataaatattgtgagccacatgactatgaatactgctgtccttgtgagtggcaccgtacagaacatgataggcaactcaatgaagtagagaacaatattmagaagaaagcttgctgttgtgagggattcccattccatgaggtaatatccagtaattcaactgtattaattttagaaactttcttaaaagtttaaatctcagtttctattttcktttttcttgctaggttattcaagaattccttttaaacaaggataaattggtgaaggttatcaggtaccaaagacctgatttgttattgtttcaggtatctgaaaataaattcttctttactgtatgaagttatatgctggaaagataggaacagatattcactctgattggtctgagaggaggtttaaaattaaaacaggcagctcttatattttttcagcatttatttctactctctcat

SEQ ID NO: 52 - DNA, 886 bp, Homo sapiens
  SITE (808): n equals a,t,g, or c
ggttttgtgtcaggtcagtcagcgaggctggggtaggcgagagctcagccgccaccgagcccatcagggtcaagcaggctctggctaccccgtctgccccatatggctttgccctcctgaactgcgggaagaatgaaatggtcattgggtggaaaccccccaagcgtcgtggaggtggcaagatcctgggctacttcctggaccagcatgactcggaagagctggactggcatgcggtsratcagcagcccatccccacccgggtctgcaaggtcagtgaccttcatgaaggccacttctatgagttccgtgcccgggctgccaactgggcaggtgttggcgagctgtcggcacccagcagcctgtttgagtgcaaagagtggacaatgccccagccaggccccccgtacgatgtacgggcatccgaggtgcgggccacatccctggtgctgcagtgggaacccccactgtatatgggggctgggcctgtcacaggctatcacgtcagtttccaggaggaaggctctgagcagtggaagccggtcacctcaggccccatctctggcacccacctgagggtttccgacttgcagccaggaaagagttacgtgttccaggtacaggccatgaattcagctggtctggggcaaccgtccatgcccactgatcccgtgctcctggaggacaagccaggtgcccatgagatcgaggttggtgtggatgaagagggctttatctatttggcttttgaagcccctgaagccccgagtcctcagagttcagtgggtccaaaagaatacaaagggcncaatggaaccccagagggtcaagatcgaaggtaaagttaacaagtccaaggtcatctgaaaaaaaccgggctcgagga

SEQ ID NO: 53 - DNA, 902 bp, Homo sapiens
ggacggggatcctgatgctctcaccccaccctccgctgcctctgcttctgccaaggtggccgacactgggccccctaccgaccgtggcgtccaggtgactgagcacggggccacagctgctcttgtccagtggccggatcagcggcctatcccgggcatccgcatgtaccagatccagtaccaacagctcggctgatgacatcctcgtctacaggatgatcccggcggagagccgctcgttcctgctgacggacctggcgtcaggccggacctacgatctgtgcgtgctcgccgtgtatgaggacagcgccacggggctcacggccacgcggcctgtgggctgcgcccgcttctccaccgaacctgcgctgcggccatgcggggcgccgcacgctcccttcctgggcggcacgatgatcatcgcgctgggcggcgtcatcgtagcctcggtactggtcttcatcttcgtgctgctaatgcgctacaaggtgcacggcggccagccccccggcaaggccaagattcccgcgcctgttagcagcgtttgctcccagaccaacggcgccctgggccccacgcccacgcccgccccgcccgccccggagcccgcggcgctcagggcccacaccgtggtccagctggactgcgagccctgggggcccggccacgaacctgtgggaccctagccaggcgcccccccctctaagggtcctctggccccacggacagcaggacccggacaccctgtgggacctggcctcaaactcaccaaatcgctcatggtttttaaaactctgatggggagggtgtcggggacaccggggcaaaacaagaaagtcctatttttccaarmttgggcgaaacaaaaaaaaaaaaaaaaaaaaaaaaaaaaaaaaaaaaaa

SEQ ID NO: 54 - DNA, 559 bp, Homo sapiens
  SITE (134): n equals a,t,g, or c
  SITE (140): n equals a,t,g, or c
  SITE (476): n equals a,t,g, or c
  SITE (527): n equals a,t,g, or c
  SITE (540): n equals a,t,g, or c
  SITE (550): n equals a,t,g, or c
cggcagtgggattactcagtgttgagagaaacaacacggaaagcccagagcagaggagggagaaggccccattctctcagctttaatctactgcacctcggagggcagagctctaaccagacacgctgcaagcntcagantcgggatgaacatcgaggtggggaacatttcttatacaggagccatcatctcctggtcgtcctcggagccctgcctggaggactattaccatattatgtacaggcccaactggaacagcatcttctctggctatcttcgctacagcttccaccacgaggagaaggtgcctcgaacgatcagctccgtggtgctggaacatcttgccccttccactctctacttcctgtgcatcagctgtaagaaggctgccttcccttacaggcactactgcaccatgttccacaccctggataagagtccgctggctcctggaagctccctgggtagacccccanatctctctttgggtgctgatggccattctgctgggcctgcttcacaagccncttgggcttcatnttgcttcaanattttgggg

SEQ ID NO: 55 - DNA, 2678 bp, Homo sapiens
  SITE (2535): n equals a,t,g, or c
  SITE (2628): n equals a,t,g, or c
  SITE (2638): n equals a,t,g, or c
  SITE (2669): n equals a,t,g, or c
cggtctctcagagccgcacactccgcggagctcctgccacagccgtcgccttcgcggcggctctccagccccgcgcctcagcctcggcgccgcatcaccgcgtcccaggcctccttccctccctctgccactccccctccctttcccgctcttcttgcccacccggccggcagagagagcctggatacgaagcaggcgggcttcagagtgggttggaaaaatggaggtgccgcgcctggatcatgccctcaacagccccaccagcccctgtgaggaggtgatcaaaaacctcagcctggaggccattcagctgtgcgaccgggacgggaacaaatcacaagacagtggcatagcagagatggaagaacttcctgtaccacataacatcaaaataagcaatataacgtgtgactcattcaagatttcatgggaaatggattcaaaatcaaaggatcgcattacacactattttattgacctcaacaagaaagagaacaagaactccaataaatttaaacacaaggatgttcccacaaaattggtggcaaaagctgttcccttgcctatgactgtccgtggacactggtttttaagcccaagaactgaatatacagtagcagtgcagactgcctcaaaacaagttgatggtgattatgttgtgtctgaatggagtgaaattatagaattctgcaccgcagactattcaaaagttcatctaacacaattgttggagaaggctgaagtgattgcaggacgcatgcttaagttttctgttttttatcgtaatcagcacaaagaatattttgactatgttcgagaacatcatgggaatgctatgcagccatctgtcaaggataacagtggtagccatggctctcctatcagtggaaaattagaaggcatcttcttcagctgcagcactgaattcaatactggaaagccaccccaggattcaccttatggaagatacaggtttgagattgccgcagaaaaactttttaaccccaatactaacttatactttggggacttctactgtatgtacactgcttatcattatgtgattcttgttattgctcctgtgggatcaccaggagatgaattttgtaagcagcgccttcctcaactaaattctaaggataataaatttttgacctgtacagaagaagatggggtgctggtttaccaccatgcccaggatgtcattttagaagtcatttacactgaccctgtggatctttctctgggcaccgtggcagaaatcactggtcatcagctcatgagtttgtctactgcaaatgcaaagaaagatcccagctgcaaaacctgtaatatcagtgttggacgttaatgcccacttttcttattcttactcagccccttttcctcccttaggagcattggtcctctgttgtccatttttatcaccagatgttttccactgaagcatgcacatgccactgtcaccaaaacaaacaactaccactttccaaatttcattcagaaccattttagtgttttcctattccctacccctcccactactttcaatgatgaaataccctaagttaagttctccttttgacactttattgcctagatgctgcaatgtttttatgtttcctttatgccaaacataacaaaacagttatatagactgctttagcaaagtacacaataatggcttataaatggtgtttaaatatgcattcattttaatctactgaacaaatattgggataactccaaaccgcatgaaagggtgtaattgcagcatgagttaaatcttgaagcctagaattgtcagcacttccaacttcttgtttgacagtgttatttatgttatttatattagctaacaggaaacaactactgtgtttcaacataataaatataatagaaaaatattttatttgtattgttgtataaaatatttacaatcatatagaatatatagagttacattttaatagcaactgtgtacatgtcacgaaaccatttcccttatcaaagatgtaatttgtaaacctcaaatagttgtgtatctgtcctgttagaagtagatgacttcaattaaacaaatttatgaaggacattattctgattcataaaagttataaaatattaggtaaatacagagaaaacaataagcctctgaaataagtctgtttctgaaatagtcaatagtcttcccatccaaactataagagaatgtgaatttcttcaacatcatacttaaacattacagaaaatagaaatacaaacaaggttggtacatgagagaaaatgttgaccttttacttccttttacaaaaatgaaaataataaacatgttttcgtataaaataacacaaaatgatatacactgaagttgatgaagcaaataaatattctggcttctttttcaaggtatcagggcaaacaatttccaaacttttcattttgtacagaaggatgaataactacagctcatggggaaatgttttgactttacaaagtatagatgttgggaacattaaggaaaaatgtatattncccaatggaaaaaatagttattatccatcttataggtaaaccaaaaggattaggccattaatactttggggccactttgggtttttatacctnccgggccccntttcctttccccaattaccccttttttaaanttttttatt

SEQ ID NO: 56 - DNA, 467 bp, Homo sapiens
  SITE (428): n equals a,t,g, or c
  SITE (467): n equals a,t,g, or c
ggcacgagtacgagttcaaagtgagaccatcctctggccgggytcgaggccctgacagcaacgtgctgctcctgaggctgccggaaaaagtgcccagtgccccacctcaggaagtgactctaaagcctggcaatggcactgtctttgtgagctgggtcccaccacctgctgaaaaccacaatggcatcatccgtggctaccaggtctggagcctgggcaacacatcactgccaccagccaactggactgtagttggtgagcagacccagctggaaatcgccacccatatgccrggctcctactgcgtgcaatggctgcagtcactggtgctggagctggggagcccagtagacctgtctgsctccttttagagcaggccatggagcgagcacccaagaacccatgagcatggtccctgggacctggancagctgaaggctacttggaagcggctgaagtcatgccan

SEQ ID NO: 57 - DNA, 339 bp, Homo sapiens
aggaagagacgaccctggagccagtccccagagcagcagccagccagaccacggccgcctctcccccccagaagctcccgacaggcccaccatctccacggcctccgagacctcagtgtacgtgacctggattccccgtgggaatggtgggttcccaatccagtccttccgtgtggagtacaagaagctaaagaaagtgggagactggattctggccaccagcgccatccccccrtcgcggctgtccgtggagatcacgggccttagagaaaggcacctmctacaagtttcgagttccgggttytgaacatgctgggggagagcgagcccagsgcccct

SEQ ID NO: 58 - DNA, 803 bp, Homo sapiens
agatgtcatagacttaaaaaaaggagtggctcattttgaaaggattggaggagaatctgttggggatttgatgataaggaatattcagttacatcattcaggaatatctctgcacagtacaaacaaccctagaaagtttatctgcagtagccgatatcattgttagaggtccaccaggtcctcctgaggatgtgcaagtggaagacatttccagtactacttctcaactaagttggagagcaggcccagataataacagtcccattcaaatatttactattcagactcggacaccattttctgtgggttggcaggctgttgctacagttccagaaattctcaatggtaagacatacaatgcaacagtggttggtttgagtccttgggtggaatatgaatttcgtgttgttgccggcaacagcattgggattggagaaccaagtgaaccatcagaattgttaagaactaaagcatcagtccctgttgtggcaccagtaaacatccatggaggtggaggaagtcggtctgaactcgtcattacgtgggagtcaattccagaagaactgcagaatggggagggatttggatatatcatcatgttccggccagtgggctcgacaacctggtccaaggagaaagtgtcatctgtggaatcatcaaggtttgtctacagaaatgaaagcatcatcccactgtctccckggtgaagtcaaagtgggtgtgtataataatgaaggagaaggatccctgagtactgtgaccattgtctactctggggaagatgaacctcaactggccccaag

SEQ ID NO: 59 - DNA, 401 bp, Homo sapiens
cagatggcggaagcggaatttaaggaccatagtacagctatggatactgaaccaaacccgggaacatcttctgtgtcaacaacaaccagcagtaccaccaccaccaccatcammacttcctctctcgaatgcagcagccacagatctctgtctacagtggttcagaccgacatgctgtacaggtaattcaacaggcattgcatcggccccccagctcagctgctcagtaccttcagcaaatgtatgcagcccaacaacagcacttgatgctgcatamtgcagctcttcagcagcagcatttaagcagctcccagcttgggagccttgctgctgttcaggcaagtttgtccagtggaagaccatctacatctcccacagggaagtgtcacacagcagtcaag

SEQ ID NO: 60 - DNA, 409 bp, Homo sapiens
  SITE (358): n equals a,t,g, or c
  SITE (362): n equals a,t,g, or c
  SITE (377): n equals a,t,g, or c
  SITE (408): n equals a,t,g, or c
gtgacaatggttctaaaatccaaaactttgtattagaatgggatgaaggaaaaggaaatggagaattttgtcagtgttacatgggctcacagaaacaatttaaaattactaaactttcaccagcaatgggctgtaaattcagactatcggccagaaatgactatggtacaagtggttttagtgaagaagtcttatattacacctcaggctgtgctccttctatgccagcaagtcctgtattaaccaaggctggaattacttggttatccttacaatgggagtaagccctcaggaacaccatcagatgaaggrattttcttacattttagagatggaggaagaaacttcaggrtatggntttnaagcctaaatatggnggagaagatcttgcttacacagtgaaaatcnc

SEQ ID NO: 61 - DNA, 338 bp, Homo sapiens
  SITE (255): n equals a,t,g, or c
  SITE (284): n equals a,t,g, or c
  SITE (303): n equals a,t,g, or c
gtttgaagctatggcattcccccactatgagcccacctgtcagccaggctatctgccttgatcctagatgaagtggccattctgcctgcccctcagaacctctctgtactctcaaccaacatgaagcatctcttgatgtggagcccagtgatcgcgcctggagaaacagtgtactattctgtcgaataccaggggtgagttttttcttttaatagttcttctcccttaagcagaattggttcctggaaggcatancccttcctcctgagcccaaggtggctttntgagtccaggggatagatnatccccaaagatctaccccctctgtctgcatgggc

SEQ ID NO: 62 - DNA, 557 bp, Homo sapiens
gggtatgttcaccctggacgtggaggagaatgagaatggggagcgcaccccctacctaattgtcatgggtgctttggacagggaaacccaggaccagtatgtgagcatcatcatagctgaggatggtgggtctccaccacttttgggcagtgccactctcaccattggcatcagtgacattaatgacaattgccctctcttcacagactcacaaatcaatgtcactgtgtatgggaatgctacagtgggcaccccaattgcagctgtccaggctgtggataaagacttggggaccaatgctcaaattacttattcttacagtcagaaagttccacaagcatctaaggatttatttcasctggatgaaaacactggagtcattaaacttttcagtaagattggaggaagtgttctggagtcccacaagctcaccatccttgctaatggaccaggctgcatccctgctgtaatcactgctcttgtgtccattattaaagttattttcagaccccctgaaattgtccctcgttacatagcaaacgagatagatggtgttg

SEQ ID NO: 63 - DNA, 2938 bp, Homo sapiens
  SITE (35): n equals a,t,g, or c
  SITE (56): n equals a,t,g, or c
  SITE (68): n equals a,t,g, or c
  SITE (1040): n equals a,t,g, or c
acaccaagaagtcccacaaggccactgtgcatgtncgggtcaacgatgtgaacgantttgccccagtntttgtggaacggctgtatcgtgcggctgtgacagaggggaagctgtacgatcgcatcctgcgggtggaagccattgacggtgactgctccccccagtacagccagatctgctactatgagattctcacacccaacacccctttcctcattgacaatgacgggaacattgagaacacagagaagctgcagtacagtggtgagaggctctataagtttacagtgacagcttatgactgtgggaagaagcgggcagcagatgatgctgaggtggagattcaggtgaagcccacctgtaaacccagctggcaaggctggaacaaaaggwtcgaatatgcaccaggtgctgggagcttggctttgttccctggtatccgcctggagacctgtgatgaaccactctggaacattcaggccaccatagagctgcagaccagccatgtggccaagggctgtgaccgtgacaactactcagagcgggcgctgcggaaactctgtggtgctgccactggggargtggatctgttgcccatgcctggccccaatgccaactggacagcaggactctcggtgcactacagccaggacagcagcctgatstactggttcaatggcacscaggctgtgcaggtgcccctgggtggccccagtgggctgggctctgggccccaggacagcctcagtgaccacttcaccctgtccttctggatgaagcatggcgtaactcccaacaagggcaagaaggaagaggaagccatcgtatgtaacactgtccagaatgaggacggcttctctcactactcgctgactgtccacggctgtaggattgccttcctctactggcccctgcttgagagtgcccgcccagtcaagttcctctggaagctggagcaggctgaccacaaggaccagtgaggactaatttgagttttcacctccttctgtttctcttgcaagtcctggtggagtggctgngtctgtgatgatgagtggcaccactacgctctgaacctcgagttccccacagtcacaytctataccgacggcatctccttcgaccctgccctcatccatgacaatggcctcatccacccaccccgaagagcctgctctcatgattggggcctgctggactgaggagaagaacaaagagaaggaaaagggagacaacagtacagacaccacccaaggagaccctttgtcgatccaccactacttccatggctacctggctggtttcagcgtgcgctcaggtcgcctggagagccgcgaggtcatcgagtgcctctatgcatgtcgggaggggctggactatagggatttcgagagcctgggcaaaggcatgaaggtccacgtgaacccctcacagtccctgctcaccctggagggggatgatgtggagaccttcaaccatgccctgcagcatgtggcttacatgaacactctgcgctttgccacgcccggcgtcaggcccctgcgcctcaccactgctgtcaagtgcttcagcgaagagtcctgcgtctccatccctgaagtggagggctacgtggtcgtccttcagcctgacgccccccagatcctgctgagtggcactgytcattttgcccgcccagctgtggactttgagggaaccaacggcgtccctttgttccctgatcttcaaatcacctgctccatttctcaccaggtggaggccaaaaaggatgagagttggcagggcacagtgacagacacacgcatgtcggatgagattgtgcacaacctggatggctgtgaaatttctctggtgggggatgacctggatcccgagcgggaaagcctgctcctggacacaacctctctgcagcagcgggggctggagctcaccaacacatctgcctacctcactattgctggggtggagagcatcactgtgtatgaagagatcctgaggcaggctcgttatcggctgcgacacggagctgccctctacaccaggaagttccggctttcctgctcggaaatgaatggccgttactccagcaatgaattcatcgtggaggtcaatgtcctgcacagcatgaaccgggttgcccaccccagccacgtgctcagctyccagcagttcctgcaccgtggtcaccagcccccgcctgagatggctggacacagcctagccagctcccacagaaactccagtacgtaagcctggtggggctgggcagggaggggcaggtggcaggtgagtgtgttgggacaggtatcctccccctccacctctgggagaggacaaggtaggtggagcaatgggttctgttccctgtggtacctgccttagttgacagctatggaccaatccctctctccctttggatcattcactttcccttgtgaagaacatgagccttgtgtcattgtagggatgcttatgcctgcagtcataaagtcagtgtgggtttaggcgtgtttgttatacctgatgatgcctccttccccagccccaagcaatatcaaattagccctggacctaggatcctctgtggtgaaactatcaagtatttactaagcacctactatgtactagcactgtcctaagatgatctaaatgatttataggatagatcagtccctatccccaaggagagaattggtactattacatgtaaaattatgtgctacgtatgcagtcacaagaatatttctaaaaaatatatgcaaatatgcaaagcgttacattcagatggagtgctgcccttcaaagctgcccttcaaagcaacctggccgtggtcccaaaggttcccggtcatggtcctttacgaatggtgcaattttattttcaacttttgagttgcgtaattgtagaaaaaccagaaaatatcaaatatttctttta

SEQ ID NO: 64 - DNA, 508 bp, Homo sapiens
  SITE (389): n equals a,t,g, or c
  SITE (483): n equals a,t,g, or c
gctttgatcaacagccgctttccaattccatcagcaacagatcctgacacaggcttcaatggtgtacagcattatgaattgttaaatgggcagagtgtttttggactggatatcgtggaaactccagagggagagaagtggccacaactgattgttcagcaaaacttggatagagaacagaaagatacctatgtgatgaaaatcaaagtagaggatggaggcactccacagaaatccagtacggccatactgcaggtcacagtaagtgatgtaaatgacaacaggccagtgtttaaagagggtcaagtggaggtgcatattccagagaatgctcccgtagkkacctctgtaattcagctccatgccactgatggcagatataggcagtnaatgctgaaatccggtacatttttggtgcccaggtcgcccytgcaaccaaaagactstttgctttaaatactattggggtgattacatttcagnggtccttagataggaggagacagcc

SEQ ID NO: 65 - DNA, 2715 bp, Homo sapiens
agccaaaatccacaagcgctctgtctcggtgacgtccattacctcgactgtgctgcctcctgtttacaaccaacagaatgaagacacctgcataatccgcatcagtgtggaagacaataacggcaacatgtacaagagcatcatgttgacgagccaggataaaacccccgctgtgatccagagagccatgctgaagcacaatctggactcagaccccgccgaggagtacgagctggtgcaggtcatctcggaggacaaagaacttgtgattccagamtcagcaaatgtcttttatgccatgaacarccaagtgamctttgacttcattttgcgcaaaaagaactccatggaagaacaagtgaaactgcgtagcggaccagcttgacgttgcccaggacagctaaacggggctgctggagtaacagacacagcaaaatcaccctctgaagggagggaccagtggccccttgtttgccaaaggcagagtggggctgagaaacaggctgcggtgattgcaattaccatccggtgttcgaggatcattggtgaagtcagcagatatttattgagttcctgtggtgtgcaaagcattatgataggcaccgtggggaaactggaaatgaatttgacatgaaaaggatgaacgattcactgattctctttgactcatttgagactaaaatgcagaattaccaacatttaaaacatatatatgcacatgtatttggtatgcatgtgtatatatataaaaatatataagagggactttatgggatagtatggactatggaaaaacaaatttgcacaatggcctgggaagttgaggtcactttttacagggaaatagaagaaactgagaacctagyctcgtatattctgagtaaatggaatcagtcctgggaatagagagtgtcctttgtgccagtattacaagaagcccaaactttatttttataaagggagaggatgactttctcaatcaagtgccaccagataaaaacaactgcagaggctggaactgccacaggctgtatgaaaggccactttggaaagggtttggatgagctggtggccttcaacctctgcctgcatctgccactttctgctaccctagggaggccaggaggagcttcggaggaccatcgccccactggtctagccatcatgacacctctggaggtgtcaagctcctgaaacaagctcatttcagtttctggcaaccccgtgtatttccgttttccccctaaagaacatatcataatcattgcacaaataaccatgttctttggtaatgaagccagaaaagaaagcgcaaaagaatggtgactcatttggactcttatctgtcttggaatgtcactgcttcattgccttctctgattgccttttgcatgtaaaactatgtgtctggagtcttttgccatctggatcttagtacctctttattatgtgcaatttattcctcaggtgtggaaatttctactgcaattgactacgtttgattattttgagcttgtgaaagatttctgaacagtgattgtcccgttaatagcccctcagaagatgttccctgctgataacagcatcctattttacttacttttatagcattactgtgcctagtcgtggggaaagagatggggctgtatagattatctgaatcatttgtctaagaggtacattcttccagatggaatcaataacttttttttttccaggttcccgtgcttgctatcacagtatcattgttaagtgacacttttgtctctcataacaccatcacactcttccttccaagtctgagctgtgctggggtttgaactaaaagccatatgtggaatattgacatgtgtaagaagcactttcagaatgttgtcctttttaagaaatgattctcaaaataccagtttttattccaaaaatttagagaacaaacccggaatatgaagtgcagattgtaacatggagctatttttttttcytaatcccataatacagctcctaaaagttgtgtgggatttgcgttgcataaatagccatgtgaattccacaagaagcaccagggaaagtttagagatttgcggcaatggaccgaagaacgggccaggaagtcctccaatttcctttggtctttccaggagattggactacacattgtaaagactgactgggtttcaactagtcaaaaagcactttcttctgttttcaatccctgttcgatttgtgcttctgtgcttgtaggagagatggccagggtggcagccctcatgcaggttgaagtatatgtagcctcagcctgatattcttggtgcgaaggtaaaaaaaaaaaaataaataaaaccattggcctggttgagggcgtgaccaccaagacatatatgttgtgcccgtgttcatcctgtgtatttatactgtatatgtagagtctagatttatatactgcaatgtaaaatatatatatatttaccttttttaaagacaatggaaattccaagtagctaaaacttagcttcatttatttaatgccactttaaatgtcttaaatttgtttcctggtggacagccgggtaatgcttttagctgctcgcatgcttgtctttctgcatctccatcatctgtttaccttttggttaaactaataaactagtttgggacttggctggcatgtgctgccagacccaaagggaaaaaaaaaaaaaaaaaaaaaaaaaaaaa

SEQ ID NO: 66 - DNA, 658 bp, Homo sapiens
  SITE (568): n equals a,t,g, or c
  SITE (577): n equals a,t,g, or c
  SITE (589): n equals a,t,g, or c
  SITE (633): n equals a,t,g, or c
  SITE (641): n equals a,t,g, or c
  SITE (656): n equals a,t,g, or c
ggaactggaccgggaggaagttgatttctacagctttggggtagaagctcgagaccatggcactccagcactcactgcctcggccagtgtcagcgtgactgtcctggatgtcaacgacaacaatccaacctttacccaaccagagtacacagtgcggctcaatgaggatgcagctgtgggcaccagcgtggtgacggtgtcagctgtggaccgtgatgctcatagtgtcatcacctaccagatcaccagtggcaatactcgaaaccgcttctccatcaccagccaaagtggtggtgggctggtatcccttgccctgccactggactacaaacttgagcggcagtatgtgttggctgktaccgcctccsatggcactcggcaggacacggcacagattgtggtgaatgtcaccgacgccaacacccatcgtcctgkctttcagagctcccactatacagtgaatggtaatgaggaccggccggcaggcaccacggtggtgctgatcagcgccacggatgaggacacaggtgagaatgcccgcatcacctacttcatggaggacagcatnccccagttncgcatcgatcanacacgggggctgtcaccaccaagcttgagctggactaccaaganccaagtgnctttacacccttggnca

SEQ ID NO: 67 - DNA, 487 bp, Homo sapiens
gcagggctccagtcaggccgatccgctccgctcacggaaggaaaacagaaataacttgctggcttgtctggagtcacatgtacttaggtgacaatttacagaaagtcatctctgcagcttgatgggcgacaacccttttcaaccaaaaagtaattcaaaaatggcagaactgtttatggaatgtgaagaagaggagctggaaccatggcagaagaaagtaaaagaagttgaggatgacgatgatgatgagccaatctttgttggcgagatatcaagttcaaaaccagcaatttcaaatattttgaacagagttaaccccagctcatattcaaggggactaaagaatggtgcactcagtcgaggtattactgctgcattcaagcctacaagtcaacactacacgaatccaacatcaaatccagtgcctgcctcaccaataaattttcatcctgagtctagatcttcagatagtctgtattgtcagcct

SEQ ID NO: 68 - DNA, 359 bp, Homo sapiens
  SITE (268): n equals a,t,g, or c
tatgaagagagcccagtgtaccaagtgtacgtgcaagccaaggacctgggccccaacgccgtgcctgcgcactgcaaggtgctgagtgcgagtactggatgctaatgacaacgcgccagagatcagcttcagcaccgtgaaggaagcggtgagtgagggcgcggcgccgggcactgtggtggcccttttcagcgtgactgaccgcgactcagrggagaatgggcaggtgcagtgcgagctactgggagacgtgcctttccgcctcaantcttcctttaagaattactacaccatcgttaccgaagcccccctggaccgagaagkcgggggaytctacaccctgactgtagtggctcggg

SEQ ID NO: 69 - DNA, 762 bp, Homo sapiens
  SITE (92): n equals a,t,g, or c
  SITE (603): n equals a,t,g, or c
  SITE (732): n equals a,t,g, or c
  SITE (749): n equals a,t,g, or c
ccaggcctgggaccctgttgggaacttttaatgccatggatccagacagccagataagatatgaactggttcatgacccagcaaattgggtnagcgtcgacaaaaactccggagtggtcatcaccgtggagccaattgaccgagaatcccctcatgtaaataacagtttttatgtaatcatcattcacgctgttgatgatggcttcccaccgcagactgctacagggaccctaatgctcttcctgtctgacatcaatgacaacgtcccgactctccggccacgttcccgctacatggaggtctgtgagtctgctgtgcatgagcccctccacatcgaggcagaggatccggacctggagccgttctctgacccatttacatttgaattggacaatacctggggaaatgcggaggacacatggaagttggggagaaattggggtcaatcagttgaacttttaaccttgagaagcctgccacgtggtaattacttggtgccactcttcattggagacaaacagggactttcccagaagcaaactgtccatgtaaggatctgcccctgtgccagtgggctcacatgtgtggagcttgcagatgcanaagtggggcttcatgtgggggccctgttccctgtctgtgcagcatttgtggctctggcagtggctctgctttttctgatgcgatgctattttgtgcttgaacctaagaggcatggatgctctgtatccnatgatgaaaggccaccnaacactggttatg

SEQ ID NO: 70 - DNA, 925 bp, Homo sapiens
  SITE (6): n equals a,t,g, or c
  SITE (8): n equals a,t,g, or c
  SITE (26): n equals a,t,g, or c
  SITE (505): n equals a,t,g, or c
  SITE (525): n equals a,t,g, or c
  SITE (544): n equals a,t,g, or c
ccattntngatggtgaaggggaagtnatgtcccaccccagcaaggcggtattccaggcgggcattgtcaccagcatcagcgtcgatagcctggacatggagaaccaggtagcctaaggggacgctctccaggacagtagcctggaaaggggtgctgacgaagatgggggcattgtcgttgatatccaggacctgtactgtcaccaagccagagacattagagagtgggggacggccaccatcctgtgctcgcacccgtaggttwactccttggtcgtctcatagtcaagagggctcaccacatccagagctccagtctgggcatccagataaaactgtccccgagcattgccactcatgatgctatagtgcaccacggcattgctccccttgtctcgatccgaggctgtgactcggagtactggggcccctggagtcacatcctccctcacctggaccacatagcgcttctcactaaactggggggcattatcattgtcatcctncacagaaaggaaaccagcgncttgtggtactccgagganccgggtcacgaccctggtcacttgcctctaccgtcagctggtaggattccacctcttcccgatccacagggccacgggttcggatcaccccagagcgagggtcgatctcaaagacttcagaggggcttgcccccagacccctccagcaggcggtacagaatattggcattgggaggggcatcaccatccgtggccctgacagtgagcacctcatagccaacctccaggttctccctgaggctctccttgtactcctgctgctcgaacacagggtcatggtcattggtgtcagtaaccaagatggtgagtgtagccagggcacttcgtcggkgcatgccgtggtcctgcgccgtgaccctgaagacgtgggtgcctcgtgcc

SEQ ID NO: 71 - DNA, 475 bp, Homo sapiens
  SITE (446): n equals a,t,g, or c
gactatgttggctggtcttgaactcctgacatcaagtgatccgcccacctcggcctcccaaaaagtactgggattacaggcatgagccaccacgccaggctggtagcagtctttcctagaatgtggatgccttggaaaacaggggctctgccttgtttccctataacctagaatggcatctggcacacagcagatgctacatctattgtaaatgaatgaatgaaagaagtgtccttgcagccacactggcagccataacatagtggttataaatctagactctggagtctcaagtgcaaatgtcattggcctctcctccagcctcctcaaggggcactyaatgactggaagygccctgatatgactgtggttagactgacatgactgccagatggtgggacttggctggacaaagctgargcggaaaatggtgtgaccaggaagcngacttgcatgagccaaattgggcactccc

SEQ ID NO: 72 - DNA, 2427 bp, Homo sapiens
aaattagtgaaaatgcagccactgagatgcggttccctctaccccacgcctgggatccggatatcgggaagaactctctgcagagctacgagctcagcccgaacactcacttctccctcatcgtgcaaaatggagccgacggtagtaagtaccccgaattggtgctgaaacgcgccctggaccgcgaagaaaaggctgctcaccacctggtccttacggcctccgacgggggcgacccggtgcgcacaggcaccgcgcgcatccgcgtgatggttctggatgcgaacgacaacgcaccagcgtttgctcagcccgagtaccgcgcgagcgttccggagaatctggccttgggcacgcagctgcttgtagtcaacgctaccgaccctgacgaaggagtcaatgcggaagtgaggtattccttccggtatgtggaagacaaggcggcccaagttttcaaactagattgtaattcagggacaatatcaacaataggggagttggaccacgaggagtcaggattctaccagatggaagtgcaagcaatggataatgcaggatattctgcgcgagccaaagtcctgatcactgttctggacgtgaacgacaatgccccagaagtggtcctcacctctctcgccagctcggttcccgaaaactctcccagagggacattaattgcccttttaaatgtaaatgaccaagattctgaggaaaacggacaggtgatctgtttcatccaaggaaatctgccctttaaattagaaaaatcttacggaaattactatagtttagtcacagacatagtcttggatagggaacaggttcctagctacaacatcacagtgaccgccactgaccggggaaccccgcccctatccacggaaactcatatctcgctgaacgtggcagacaccaacgacaacccgccggtcttccctcaggcctcctattccgcttatatcccagagaacaatcccagaggagtttccctcgtctctgtgaccgcccacgaccccgactgtgaagagaacgcccagatcacttattccctggctgagaacaccatccaaggggcaagcctatcgtcctacgtgtccatcaactccgacactggggtactgtatgcgctgagctccttcgactacgagcagttccgagacttgcaagtgaaagtgatggcgcgggacaacgggcacccgcccctcagcagcaacgtgtcgttgagcctgttcgtgctggaccagaacgacaatgcgcccgagatcctgtaccccgccctccccacggacggttccactggcgtggagctggctccccgctccgcagagcccggctacctggtgaccaaggtggtggcggtggacagagactccggccagaacgcctggctgtcctaccgtctgctcaaggccagcgagccgggactcttctcggtgggtctgcacacgggcgaggtgcgcacggcgcgagccctgctggacagagacgcgctcaagcagagcctcgtagtggccgtccaggaccacggccagccccctctctccgccactgtcacgctcaccgtggccgtggccgacagcatcccccaagtcctggcggacctcggcagcctcgagtctccagctaactctgaaacctcagacctcactctgtacctggtggtagcggtggccgcggtctcctgcgtcttcctggccttcgtcatcttgctgctggcgctcaggctgcggcgctggcacaagtcacgcctgctgcaggcttcaggaggcggcttgacaggagcgccggcgtcgcactttgtgggcgtggacggggtgcaggctttcctgcagacctattcccacgaggtttccctcaccacggactcgcggaagagtcacctgatcttcccccagcccaactatgcagacatgctcgtcagccaggagagctttgaaaaaagcgagccccttttgctgtcaggtgattcggtattttctaaagacagtcatgggttaattgagcaagccccgcccaacacggactggcgtttctctcaggcccagagacccggcaccagcggctcccaaaatggcgatgacaccggcacctggcccaacaaccagtttgacacagagatgctgcaagccatgatcttggcgtccgccagtgaagctgctgatgggagctccaccctgggagggggtgccggcaccatgggattgagcgcccgctacggaccccagttcaccctgcagcacgtgcccgactaccgccagaatgtctacatcccaggcagcaatgccacactgaccaacgcagctggcaagcgggatggcaaggccccagcaggtggcaatggcaacaagaagaagtcgggcaagaaggagaagaagtaacatggaggccaggccaagagccacagggcggcctctccccaacgtcgac

SEQ ID NO: 73 - DNA, 1596 bp, Homo sapiens
gcatttacatgccctgtttcatttaatcctcaagaaagccctgtaaggttggcattgttatccccacattacagatgaggaactaaggtttaaaaggtgaagtaacttgagctcagaaagattaagcagctcgccctaggggaatcataagctagcatggataaagcccatatatattagaaccctgatcagaccagcttcagactctgctcctaaccactgctgcatacatccagaaagtgcggtgctgtggtaattatcttacaaggtattgatgagaatgaaagaaaattgtctcacccttttttcgacttactgtcacctgatgaaaatgacctatttaggaagacaattttattctatactaaacctgtaaggtctccaggtatttgattggcttgccatattccttctcctgattctggaagagtccagtaactgatattttacatgtaacaggacaaataacatttgaactttcagtgctagataattttttaaaatttaacctgcattttgggggctttttttctcaaaggtcatttgtttgttttattaaagaaaacttctatcagggaaccttggcctacaggcaggcaagaatttgtgatgttctcagtggcccttcaagttcattttgttacccttcacatccttgagtatcttcccctgttataaacagcatactagccaaaccaaaatggcatttggaaaagaaaacccaaattcaccgtgaatggaatccagtgaagaaatgtttaatctagttagtgggtgggctttggttgtcatggaaactcagctctgtcatcctgtgttgttactaggcaggagcagccaggtcattccataaatcatttctgtcatagctgacggtgatgcattccatctgctccatcactgcatgccatagtctgcacatttcaaatcccttccttcaatccatctgcttccccacttcccagccggacacctccccaaatacattctttttccaactttccttacagactcgcattcactttaatatatgtttagtgcactcaaaacgtactgaaaaagaaaaacattacattatctggggataggaaggattagaagagatgaggagaaggaaattaatgaggattacttttgagagtctgacatgcatatcataattttatgtcaggtattatagatattttgaaatggtgactgactcttttgaaattttaagttctttagaatgtgacgcttttaatatagcctctggttttgatggagaaacactatgctattgtcattaaaaattaattctatttccccaattgtctaatatatgtcttaaaagatctttcatattgtgaaacatcagagggtacaacctttgttcttcagtttaggtattaaagagcacacagaatactgtgtgattaaacatgtaaggccagataatgcatttgcaaaggttcctttattttaggtttaagcctgcataattgtggtcttaatctcaggatagcaagaaagagaattgtacatgaaagtatttacacaaagttcccaaagccctgtggattatgcattagtttagataaaaaaaaaaaaaaaaaa

SEQ ID NO: 74 - DNA, 1449 bp, Homo sapiens
ccacgcgtccgtcagatcctgaaggtacttgttggctaggagctgagcttatcacaacaaacaacagcattacaggaattgtcttatatgtggtcagttgtaaagctgataaaaattattctgtaaatcttgaaaacctaaaaaatttacacaagaaaagacatcacttgtctactgtaacatccaaaggctttgcccagtatgagctctttaagtcctctgccttggatgatacaatcacagcatcacaaactgcgatcgctttggatatttcctggagtcctgtggatgagattcttcaaatccctccactctcttcaactgcaactctgaatattaaagtggaatcaggagagcccagaggtcctttgaatcatctctacagagaactgaaatttcttcttgttttggctgatggtttgaggactggtgtcactgaatggctcgagcccctggaagcaaaatctgctgttgaacttgttcaggaatttctgaatgacttaaataagctggatggatttggtgattctacaaaaaaagacactgaggttgagaccttgaagcatgacactgctgcagtcgatcgttccgtcaagcgtcttttcaaagttcggagtgatcttgattttgctgagcaactgtggtgcaaattgttttttagtgtgatttcataccaagacttggtgaagtgtttcacattgatcatccagagtctacaacgtggtgatatacagccatggctccatagtggaagtaacagtttactaagtaagctcattcatcagtcttatcatggaaccatggacacagtttctctcagtgggactattccagttcaaatgcttttggaaattggtttggacaaactaaagaaagattatatcagttttttcataggtcaggaacttgcatctttgaatcatttggaatacttcattgctccatcagtagatatacaagaacaggtttatcgtgtccaaaaactccaccatattctagaaatattagtcagttgcatgcctttcattaaatctcaacatgaactcctcttttctttaacacagatctgcataaagtattacaaacaaaatcctcttgatgagcaacacatttttcagctgccagtcagaccaactgctgtaaagaacttatatcaaagtgagaagccacagaaatggagagtggaaatatatagtggtcaaaagaagattaagacagtttggcaactgagtgacagctcacccatagaccatctgaattttcacaaacctgatttttcggaattaacactaaacggtagcctggaaagaaggatattctttactaacatggttacctgcagccaggtgcatttcaagtgaagtgtgctgatgaagtcctctataagcccaagcccaaaaaaaaaaaaaaaaaaaaaaaaaaaaaaaaaaaaaaaaaaaaaaaaaaaaa

SEQ ID NO: 75 - DNA, 1087 bp, Homo sapiens
ggcacgagacgagggcagcaccagctggaaggcggccttggaggcttccaagggctgcatcaagtgcgaagcgccctgcccggaggactggctgctctacggaaggaagtgctacttcttttccgaggaacccagagactggaacacaggcaggcagtactgccacacccacgaggcggtgctggctgtgattcagagccagaaggagctggaatttatgttcaagttcacgcggagggagccctggattggactacgcagagttggggacgaattccactgggtcaacggggacccgtttgatccggacacgttcaccatcgcaggtccaggggagtgtgtcttcgtggagcccaccaggctggtgtcgacggagtgtctgatgacccggccctgggtgtgcagcaagatggcctatacttgaggtgggtggggccagaggtggccccgcccctaggcctgtgggaggtgtctggtgtctgctcaagacctgcttccagcggagccgcctgccctctgcaaggcgaagcggtgggtgcgtggcctccgccccaggcccctctcccaggccctggcgctctgagtccctggttcctggcctcctttgtctgcaggcaggtcgtgtggctcagcagttaaatcccatatgctaggtagtgtaggcatctgcccacctacacacacacacatgcataggtacacgcacgcacagacgctgtcccttctgaagctcagtgtccatcctgagccaccccacagatctctctccggccccctagaagccctctcctcactgcagccctggtgctctggggaaggaggggcattgacaggtggtttgactgttcacccagcagccccgcttcccccctggtttctctcctggctgccggcggaggtaggctgggaaagcttccccctcacctaggccgggccagccccgccccgggccccagaggtcccctgcatcccccttctttgccttgcctgggttctcaggcagggcccctgctgtgtccgtggtgctgttgtattggtcactaacggaataaagagttaatatctcaaaaaaaaaaaaaaaaaaaaa

SEQ ID NO: 76 - DNA, 2645 bp, Homo sapiens
atctggttgaactacttaagcttaatttgttaaactccggtaagtacctagcccacatgatttgactcagagattctcttttgtccacagtcatctcaggagcagaaagaaaagagctcccaaatgctatatctattcaggggctctcaagaacaatggaatatcatcctgatttagaaaatttggatgaagatggatatactcaattacacttcgactctcaaagcaataccaggatagctgttgtttcagagaaaggatcgtgtgctgcatctcctccttggcgcctcattgctgtaattttgggaatcctatgcttggtaatactggtgatagctgtggtcctgggtaccatgggggttctttccagcccttgtcctcctaattggattatatatgagaagagctgttatctattcagcatgtcactaaattcctgggatggaagtaaaagacaatgctggcaactgggctctaatctcctaaagatagacagctcaaatgaattgagtctcactctgttgcccaagctagagtgcagtgaagccgcgacatcccaggctcaagtgatcctcccacctcagcttcctgagtagggatttatagtaaaacaagtgtcttcccaacctgataattcattttggataggcctttctcggccccagactgaggtaccatggctctgggaggatggatcaacattctcttctaacttatttcagatcagaaccacagctacccaagaaaacccatctccaaattgtgtatggattcacgtgtcagtcatttatgaccaactgtgtagtgtgccctcatatagtatttgtgagaagaagttttcaatgtaagaggaagggtggagaaggagagagaaatatgtgaggtagtaaggaggacagaaaacagaacagaaaagagtaacagctgaggtcaagataaatgcagaaaatgtttagagagcttggccaactgtaatcttaaccaagaaattgaagggagaggctgtgatttctgtatttgtcgacctacaggtaggctagtattatttttctagttagtagatccctagacatggaatcagggcagccaagcttgagtttttattttttatttatttatttttttgagatagggtctcactttgttacccaggctggagtgcagtggcacaatctcgactcactgcagctatctctcgcctcagcccctcaagtagctgggactacaggtgcatgccaccatgccaggctaatttttggtgttttttgtagagactgggttttgccatgttgaccaagctggtctctaactcctgggcttaagtgatctgcccgccttggcctcccaaagtgctgggattacagatgtgagccaccacacctggccccaagcttgaattttcattctgccattgacttggcatttaccttgggtaagccataagcgaatcttaatttctggctctatcagagttgtttcatgctcaacaatgccattgaagtgcacggtgtgttgccacgatttgaccctcaacttctagcagtatatcagttatgaactgagggtgaaatatatttctgaatagctaaatgaagaaatgggaaaaaatcttcaccacagtcagagcaattttattattttcatcagtatgatcataattatgattatcatcttagtaaaaagcaggaactcctactttttctttatcaattaaatagctcagagagtacatctgccatatctctaatagaatcttttttttttttttttttttttgagacagagtttcgctcttgttgcccaggctggagtgcaacggcacgatctcggctcaccgcaacctccgccccctgggttcaagcaattctcctgcctcagcctcccaagtagctgggattacagtcaggcaccaccacacccggctaattttgtatttttttagtagagacagggtttctccatgtcggtcagggtagtcccgaactcctgacctcaagtgatctgcctgcctcggcctcccaagtgctgggattacaggcgtgagccactgcacccagcctagaatcttgtataatatgtaattgtagggaaactgctctcataggaaagttttctgctttttaaatacaaaaatacataaaaatacataaaatctgatgatgaatataaaaaagtaaccaacctcattggaacaagtattaacattttggaatatgttttattagttttgtgatgtactgttttacaatttttaccatttttttcagtaattactgtaaaatggtattattggaatgaaactatatttcctcatgtgctgatttgtcttatttttttcatactttcccactggtgctatttttatttccaatggatatttctgtattactagggaggcatttacagtcctctaatgttgattaatatgtgaaaagaaattgtaccaattttactaaattatgcagtttaaaatggatgattttatgttatgtggatttcatttcaataaaaaaaaactcttatcaaaaaaaaaaaaaaaaaaaaaaaaaaaaaaaaaaaaaaaaaaaaaaaaaaaaaaaaaaaaaaaaaaaaaaaaaaaaaaaaaaaaaaaaaaaaaaaaaaaaaaaaaaaaaaaaaaaaaaaaa

SEQ ID NO: 77 - DNA, 1204 bp, Homo sapiens
  SITE (1196): n equals a,t,g, or c
gggaaaagccactaaatgacactgtyactgaatatgaagttatatccagagaaaatgggtcattcagtgggaagaacaagtccattcaaatgacaaatcagacattttccacagtagaaaatctgaaaccaaacacgagttatgaattccaggtgaaacccaaaaacccrcttggtgaaggcccggtcagcaacacagtggcattcagtactgaatcagcggacccaagagtgagtgagccagtttctgcaggaagagatgccatctggactgaaagaccctttaattcagactcttactcagagtgtaagggcaaacaatatgtcaaaaggacatggtataaaaaatttgtaggagtgcagctgtgcaactctctcagatacaagatttacttgagcgactccctcacaggaaaattttataacataggtgatcagaggggccatggagaagatcactgccagtttgtggattcatttttagatggacgcactgggcagcaactcacttctgaccagttaccaatcaaagaaggttatttcagagcagttcgccaggaacctgtccaatttggagaaataggtggtcacaccaaatcaattatgttcagtggtatgaatgtgggactacaattcctggaaaatggtagatgctgcacaaagttaccttctgtttcatcattgcaaacaaaaatcattgaaaatactatgccgcattcatttaaagctattttgtttactatgtataaaagtctacaatctaattaatagcaatactagatgtttattattagaaaagattgctgagagtatttatcaggttttacaaagtcattttaagaaagcaagatactgatgttaacagaataacatttttggggaagctggctccctattcatggtattttaagagatcatttgtatattatttatcacactgttgtaatgatgttttgagatacttttataacaaaattaacatcaaaaaggtatatactttttaaaaaaaatttacttttattgatgtgtactcttcctattgatgagttaattccataaatctctacttagtttaacttattggatcaaattatcttcagcatgtatatctgggaaaaaaagggccgattttcacatttatatttaaacttcaattttttatatttaaacttcaatttttagcaacagctgaatagnttttgcgg

SEQ ID NO: 78 - DNA, 1104 bp, Homo sapiens
gagaattcctgagttttgctgatgacttactctctggcctgggcacatcttgtgtagcasctggtcgaagccatrgagaggtccctgaagtcagtatctactcagtcatcttcaagtgtctggagcccgacggtctctacaagttcactctgtatgctgtggatacacgagggaggcactcagagctaagcacggtgaccctgaggacggcctgtccactggtagatgacaacaaggcagaagaaatagctgacaagatctacaatctgtacaatgggtacacaagtggaaaggagcagcagatggcctacaacacactgatggaggtctcagcctcgatgctgttccgagtccagcaccactacaactctcactatgaaaagtttggcgacttcgtctggagaagtgaggatgagctggggcccaggaaggcccacctgattctacggcgactggagagggtgagtagccactgctccagcctcctgcggagtgcctacatccagagccgcgtggaaacagtgccctatcttttctgccgcagcgaggaggtccggcctgcaggcatggtgtggtatagcatcctcaaggacaccaaaatcacgtgtgaggagaagatggtgtcaatggcccgaaacacgtacggggagtccaagggccggtgagggagggtattgccctccgtgagcacagagactctccatgggagggggagcagtattctcctggatcctggggcctgggtgggctgggggacagctgaggatgggcctagcagatgaagcttgccagcaaggccaaagcaaacggtttctcctgtggatagtggacagagacctttgtaaccaatggaattattcatttttctctatcttttattttttcaaagatattatttgactctatmaaaagtctctcctttttaaaccttttcttatggatggctgtcaatcccaaggcagaagttttcaggtggagaccaagcggcctttgctcttcttccttcttcctgccacactctgctttcttcctgccatggacccctggaggagacctatggagggacagttttgacctgacccctagaggagacagttttgacct

SEQ ID NO: 79 - DNA, 441 bp, Homo sapiens
  SITE (14): n equals a,t,g, or c
  SITE (35): n equals a,t,g, or c
  SITE (62): n equals a,t,g, or c
  SITE (117): n equals a,t,g, or c
aaaattagtgcagnggagaaaacaatttttaatgnaatcttgattttacctcatatactgtncattccaaaaactctaaactttttaaagattatagatacactaccaaacatatcnccttaaaattgtataaggctgaatgaacttcatacaaatgaaaaaaatctcataaaaatacataaactatgtagcaaaagtatctgtaaaatccatggaaaataaaagttgtatcattctttttgagatacgtttattgtattcatatatattcattatttgctacctgtttaagaaagtgaaatgttatggtctcccctcttccaatgagcttaaaacatttttcccaacagtatataaatcttcaacatgagaggatgtatatttattatataaagcccagtaaagaataaaattagaagttttatcctagtaaaaaaaaaa

SEQ ID NO: 80 - DNA, 439 bp, Homo sapiens
  SITE (48): n equals a,t,g, or c
  SITE (292): n equals a,t,g, or c
  SITE (429): n equals a,t,g, or c
tgtcttatgctagagttggtagaagaatacagactgacagtgaaaganagctactgcatttttgaatctggaacctgaccgatgctatcaagtgtgggtgatggctgtgaacttcactggatgtagcctgcccagtgaaagggccatctttaggacaggtaaggagatggatgctaagggtgcattagaagacaacgctcagttcttcacagactcttgagatcagccagtaagtgtttattaagcacctattgtgtgttgagtgttgtgcaaagtgctggttatacaacgntgacttaagcctggggtcctgttctcargaagctcatgctcaggtggggagatggaaaaacagaggatcatagaaaatgtgtggtaagggccatatccagatatacacaggttattatgagaacactccagaggggncacccaagtt

SEQ ID NO: 81 - DNA, 641 bp, Homo sapiens
  SITE (578): n equals a,t,g, or c
  SITE (624): n equals a,t,g, or c
  SITE (626): n equals a,t,g, or c
  SITE (633): n equals a,t,g, or c
  SITE (640): n equals a,t,g, or c
ggtggagtaagccagaaggctgttcacccgaggaagtgatcacctacaccttggaaattcaggaggatgaaaatgataaccttttccacccaaaatacactggagaggatttaacctgtactgtgaaaaatctcaaaagaagcacacagtataaattcaggctgactgcttctaatacggaaggaaaaagctgtccaagcgaagttcttgtttgtacgacgagtcctgacaggcctggacctcctaccagaccgcttgtcaaaggcccagttacatctcatggctttagtgtcaaatgggatccccctaaggacaatggtggttcagaaatcctcaagtacttgctagagattactgatggaaattctgaagcgaatcagtgggaagtggcctacagtgggtcggctaccgaatacaccttcacccacttgaaaccaggcactttgtacaaactccgagcatgctgcatcagtaccggcggacacagccagtgttctgaaagtctccctgttygcacactaagcattgcaccaggtcmatgtcgaccaccgagggtttgggtagaccaaagcacaaanaagtccacttagagtgggaatgttcctgcatcggaaagtggctgtnangtctcanagtacanc

SEQ ID NO: 82 - DNA, 253 bp, Homo sapiens
  SITE (250): n equals a,t,g, or c
tttcgaaaaagctatttaggtgacactatagaaggtacgcctgcaggtaccggtccggaattcccgggtcgacccacgcgtccgaagtaataatgaccgcctataacatcatcggcgagagcccagccagcgcgcccgtggaggtctttgtcggcgaggctgccccggccatggccccgcagaacgtgcaggtgaccccactcacggccagccagctggaggtcacgtgggacccaccacccccggagancca

SEQ ID NO: 83 - DNA, 1313 bp, Homo sapiens
  SITE (253): n equals a,t,g, or c
actcctgtatcaaccatgagttcttctcagcctgtgtcacgaccattgcaacccatacaaccagcaccgcctcttcaaccatctggggtgccaacaagtggaccatctcagaccaccatacacttactacctacagctccaactaccgtgaatgtaacacatcgtccagtaactcaggtgaccacaagactccctgtaccaagagctcctgcaaaccaccaggtggtttatacaactcttcctgcaccaccangctcaggctcccttgcgaggaactgttatgcaggctcctgctgttcggcaggtcaatccccaaaatagtgttacagttcgagtgcctcaaacaaccacatatgttgtaaacaatggactaaccctgggatcaacaggacctcagctcacagtgcatcaccgaccaccacaagtgcatactgagcccccacgccccgtgcacccagcacccttaccagaagctccacaaccacagcgtctgcccccagaagctgccagcacatctctgcctcagaagccacacttgaagttagcacgcgttcagagtcaaaatggcatagtactgtcatggagtgtcctggaggtggatcgaagctgtgccactgttgatagctaccatctctatgcttaccatgaggaacccagtgccactgtgccctcacaatggaaaaagattggggaagtcaaggcacttcccttgcccatggcatgtactctcacccagtttgtatctggtagcaaatactactttgcagtacgagccaaggatatttatggacgttttgggcctttctgtgatcctcagtcaacagatgtgatctcttctacccagagcagttaaaccttggagcctttatattttcctcttttaaaatttccaccttttggtcttgtttttaatcttgtgcatgataccccatgtaaaatccaccttgtgcaagatttcttggacagatgtgtgtatacactacatttgtttataaccagaagcaaaataaactcagcccacaaagctagaatcttttcctggacagtttaggctttggggtttggaaatgtaaatgtgtaccttgctttagttttgaggctggggaatatgtgtgggtgtttatgtgtgtttttccttatgtaggtgttattgcattggagtctcccattttcattctcaaatttacctcttaaagtacgaagtaagtagatcaaaggatttgagatgtgtaactggcatgattctgcttttgaaggatctatagtatcattttagttaagtgggtcaaacagaatcaaaacaaaacccaaag

SEQ ID NO: 84 - DNA, 663 bp, Homo sapiens
  SITE (55): n equals a,t,g, or c
  SITE (555): n equals a,t,g, or c
  SITE (561): n equals a,t,g, or c
  SITE (587): n equals a,t,g, or c
  SITE (656): n equals a,t,g, or c
  SITE (658): n equals a,t,g, or c
ggcacgagcagaaacctcctcaacgcactcagaatctcctgtggttgtggacctnccggacacccccttcatctttaagcacaccgtcaacaattccacagctgtratttcctggacctacgccttgggcaagcarccggtcagtttctaccagcycctgttacaggaggtggccaagacacaggagaatgagttgcccgaggcaaagaatcgtccatggatcttcaacaagattttgggcactactgtcaagctgatggagctaaagcctwacacgtgttactgcctcagtgtccgtgcagccaacacagctggggtggggaagtggtgcaagccctacaaatttgcaaccctggccactgacttcagcagctttcctgagaactaccccatccagatcaccgtgcggcgcaaggaaccccggcaaaagatcgtgtcatcgggcccggaggagatgccggaggctggaggatctggaatacctatttcctggtaagggggagggccccaggacacccctaactactttcagcttcaacccaggcccttaaaaancagaanccttgagacctaacattccaaccagnaaccttgcgggccccggggtctggcaaaatgggattgggcacccaaaccctgggcttggggcccaaggntncataa

SEQ ID NO: 85 - DNA, 1029 bp, Homo sapiens
  SITE (183): n equals a,t,g, or c
ggccctgggacgggagcagatcagtgaataccaagtcctgatcacggcctcagatagtggctcacccccacttagcacccgaagacaatcactgtgtcagttgctgatgtgaatgacaatacaccaaactttcctcaaccccagcaggaacttttcgttgctgaaaacaatggccctgggctncttctaggccgagtgtttgcccaggaccccgacctggggaaagaatggccttgtctcttatgagctgttggatgttatctctgaagggccatcagcctctagcttgstgggcagtgggaatcatccagtggggccatcactgccaaaacttcctttgactttgagcagctcagggggtttcatttccaagtagaaggccgggatggtggcattcctcccagaagtgcaacagtgactataaacttgtttgtggtagataggaatgacaattatccggttatcttgtttcccttgcccagaaatggttctgtcccagtggaaattgtgccccgctctgccaggactggacacttggtcacaaaagtggtagcagaggatgctgacagtggttctaatgcctggctttcctaccacatctcccgggcgtctgactctagtctctttagaatttcagccaatataggtgagctccgtactgctcgcttagttcttcccactgatgcagttaagcagagggtggtggtagtggttcgggaccatggagacccactgccagcaagctagaggctgatggcccttcagagataacatccaacagctcataagagacaaggccattcttccccaggtcggggtcctgggcaaacactcggcctagagaggccccagggccattgttttcagcaacgaaaagttcctgctggggttgaggaaagtttggtgtattgtcattcacatcagcaactgacacagtgattgtcttcgggtgctaagtgggggtgagccactakctsaggccgtgatcaggacttggtattcactgatctgctcccggtccaggggccc

SEQ ID NO: 86 - DNA, 1356 bp, Homo sapiens
ccacgcgtccggtggtgactgcgcgggatgggggctcgccttcgctgtgggccacggctagagtgtccgtggaggtggccgacgtgaacgacaatgcgcctgcgttcgcgcagcccgagtacacagtgttcgtgaaggagaacaacccgccgggctgccacatcttcacggtgtcggcatgggacgcggacgcgcagaagaacgcgctggtgtcctactcgctggtggagcggcgggtgggcgagcacgcactgtcgagctacgtgtcggtgcacgcggagagcggcaaggtgtacgcgctgcagccgctagaccacgaggagctggagctgctgcagttccaggtgagcgcgcgcgacgccggcgtgccgcctctgggcagcaacgtgacgctgcaggtgttcgtgctggacgagaacgacaacgcgccggcactgctggcgactccggctggcagcgcaggaggcgcagttagcgagttggtaccgcggtcggtgggtgcgggccacgtggtggcgaaagtgcgcgcggtggacgctgactccggctataacgcttggctgtcctacgagttgcaaccggcggcggtcggcgcgcacatcccgttccacgtggggctgtacactggcgagatcagcacgacacgcatcctggatgaggcggacgctccgcgccaccgcctgctgttgcgggggaaggaccacggggagcccgcgctgacgtccacggccacggtgctggtgtcgttggtggagaacggccaggccccaaagacgtcgtcgcgggcctcagtgggcgctgtggatcccgaagcggctctggtggatattaacgtgtacctcatcatcgccatctgtgcggtgtccagcctgctggtgctcacgctgctgctgtacactgcgctgcgttgctcagcgccgcccaccgtgagccggtgcgcgccgggcaagcccacgctggtgtgctccagcgccgtggggagttggtcttactcgcagcagaggaggcagagggtgtgctctgcagagagcccgcccaagacggacctcatggccttcagcccaagccttcagctgtctcgagaagattgtttaaatcctcccagtgaaaaccagaggcaggagaagtgtcccctccagtcggtgcgggtgtcaacagcaacagctggacctttaaatacggaccaggcaaccccaaacaatccggtcccggtgagttgcccgacaaattcattataacaggatctcctgcaatcatctccatccggcaggagcctactaacagccaaattgacaaaagtgacttcataaccttcggcaaaaaggaggagaccaaaaaaaaaaaaaaaaaaaaaaa

SEQ ID NO: 87 - DNA, 437 bp, Homo sapiens
ggcacgagtgagatttgtggatttaaaattcacgggcagaatgtcccctttgatgcagtggtagtggataaatccactggtgagggagtcattcgctccaaagagaaactggactgtgagctgcagaaagactattcattcaccatccaggcctatgattgtgggaagggacctgatggcaccaacgtgaaaaagtctcataaagcaactgttcatattcaggtgaacgacgtgaatgagtacgcgcccgtgttcaaggagaagtcctacaaagccacggtcatcgaggggaagcagtacgacagcattttgagggtggaggccgtggatgccgactgctcccctcagttcagccagatttgcagctacgaaatcatcactccagacgtgccctttactgttgacaaagatggttatataaaaaaaaaaaaaaaaaa

SEQ ID NO: 88 - DNA, 1896 bp, Homo sapiens
  SITE (1718): n equals a,t,g, or c
  SITE (1832): n equals a,t,g, or c
  SITE (1859): n equals a,t,g, or c
  SITE (1871): n equals a,t,g, or c
  SITE (1887): n equals a,t,g, or c
aaactgtagtaaaaatgagaaaaggctagaagaacagaatgaggaaatgatgaagaaggttttagcacagtatgatgagaaagcccagagctttgaggaagtgaagaagaagaagatggagttcctgcatgagcagatggtccactttctgcagagcatggacactgccaaagacaccctggagaccatcgtgagagaagcagaggagcttgatgaggccgtcttcctgacttcgtttgaggaaatcaatgaaaggttgctttctgcaatggagagcactgcttctttagagaaaatgcctgctgcgttttcccttttcgaacattatgatgacagctcggcaagaagtgaccagatgttaaaacaagtggctgttccacagctcctagattagaacctcaggaaccaaattctgccaccagcacaacaattgcagtttactggagcatgaacaaggaagatgtcattgattcatttcaggtttactgcatggaggagccacaagatgatcaagaagtaaatgagttggtagaagaatacagactgacagtgaaagaaagctactgcatttttgaagatctggaacctgaccgatgctatcaagtgtgggtgatggctgtgaacttcactggatgtagcctgcccagtgaaagggccatctttaggacagcaccctccacccctgtgatccgcgctgaggactgtactgtgtgttggaacacagccactatccgatggcggcccaccaccccagaggccacggagacctacactctggagtactgcagacagcactctcctgagggagagggcctcagatctttctctggaatcaaaggactccagctgaaagttaacctccaacccaatgataactactttttctatgtgagggccatcaatgcatttgggacaagtgaacagagtgaagctgctctcatctccaccagaggaaccagatttctcttgttgagagaaacagctcatcctgctctacacatttcctcaagtgggacagtgatcagctttggtgagaggagacggctgacggaaatcccgtcagtgctgggtgaggagctgccttcctgtggccagcattactgggaaaccacagtcacagactgcccagcatatcgactcggcatctgctccagctcggctgtgcaggcaggtgccctaggacaaggggagacctcatggtacatgcactgctctgagccacagagatacacatttttctacagtggtattgtgagtgatgttcatgtgactgagcgtccagccagagtgggcatcctgctggactacaacaaccagagacttatcttcatcaacgcagagagcgagcagttgctcttcatcatcaggcacaggtttaatgagggtgtccaccctgcctttgccctggagaaacctggaaaatgtactttgcacctggggatagagcccccggattctgtaaggcacaagtgatccttggctttcagaatttgcaagaacagcgatttgaattttgggggggtctgctgttcattcctttaggtgctatacattattcaaaaagtctcccgcgcatttgcactaatgatggctgcatgcatagcaatcagcatgtgagcaaaatcgacaagaaaaccttgactttacagagcagtgtgtgagtaaacagaatgaaaacaacaacctccactctttagtttatataagtttgagttctntcctaaattaaaagatctacacttgagttgggaaccgaaagagaaaaatggacttccatctgttttactggtaaaggaaatcctctgatggacaggttcagaattgaaaggaangttgttgctgggtaaaaaactctctgnacaaaaaaaccnttgggaatgctttccnccaaaaatg

SEQ ID NO: 89 - DNA, 862 bp, Homo sapiens
  SITE (138): n equals a,t,g, or c
  SITE (649): n equals a,t,g, or c
  SITE (704): n equals a,t,g, or c
  SITE (855): n equals a,t,g, or c
tcgacccacgcgtccgcccacgcgtccggtaattcctgaaacatctgtatccagtactgtttccagcacacaaactatggtaacccagcagaccattaaaactgaatcatccagtacaaatggggcagttgttaaagntgaaacttcactaacaacattcagtaccaaatctgaagttgatgaaacatatgcactgcctgcaacgaagatcagccgtgtagagacacatgctacagcaacgccgttttctaaataaataactgaagtgcacatttgttttgagcttctggaaacagtgtctcatttataagaagatggctttaaaagraagagactccttcaaatccagtggccacagtgaaagcgggagaacgacaatggtgtgatgtgggaatttttaaaaataatacagctttggtgagccagttttatttgctgccaaaagggaagcaaagcatctcaaaggtaggaaatgcagatgtacctgactacagcttgcttaagaaacaagatcttgttccaggcacaggatacagattcagggttgctgcaatcaatggttgtgggataggtcctttcagcaaaatcagtgaatttaaaacttgtattcctggttttcctggagctccttctgcagtcagaatttcanagaatgttgaaggtatccacctttcctgggaacctccaacctcaccttctggaanatattttggaatattcagcctacttggctatccgcacagcacagatacaagataatccaagtcaacttgtgttcatgaggatttattgtggtcttaagacatcatggatagtaactgctgggcaactggcaaatgcacatattggattatncatccat

SEQ ID NO: 90 - DNA, 1048 bp, Homo sapiens
  SITE (491): n equals a,t,g, or c
  SITE (1014): n equals a,t,g, or c
  SITE (1026): n equals a,t,g, or c
  SITE (1040): n equals a,t,g, or c
atgagatccggcagtttgcacggttcatgacagaaaagctgaacgtgagccacacaggagtccccctaggcgaggagtacattctggtctttagccgaacccagaacagactcattctgaatgaggcagagctgctgctggcactggcccaggagttccagatgaagacagtgacagtgtccctggaggaccacacctttgctgatgtcgtgcggctggtcagcaatgcctccatgctggtcagcatgcatggggcccagctggtcaccaccctcttcctgccccgtggggcaactgtggtagagctcttcccatatgctgtcaatcccgaccactacactccctataagacgctggccatgctgcctggcatggacctccagtatgtagcctggcggaacatgatgccagagaacacagtcacacaccctgagcggccctgggatcaggggggcatcacccatctggaccgggctgagcaagcccttatncctgcaaagccgtgaggtcccacggcatctctgttgccggaaccccgagtggctcttccgaatctaccaggacaccaaggtggacatcccatccctcattcaaaccatacggcgcgtggtgaagggccggccaggaccacggaagcagaagtggacagtcggcctatatccaggcaaggtgcgggaggcacggtgccaggcgtcagtgcatggcgcctccgaggcccgcctcactgtctcctggcagatcccatggaaccttaaatacctgaaggtgagggaggtgaagtacgaggtgtggctgcaggagcagggggagaacacctacgtgccttacatcctggctctgcagaaccacaccttcaytgagaacatcaagcccttcaccacctacctggtgtgggtccgytgcatcttcaacaagatcctcctgggacccttttgcagatgttgcttggtgttgcaaasgtagcgagcaggccacarcctggccttcggggaggttggtttcctgcattttcanggttccctgggnccattaattcccantttgggga

SEQ ID NO: 91 - DNA, 1183 bp, Homo sapiens
  SITE (72): n equals a,t,g, or c
ctgtaatatctctttggaaattcaagattgaacctggtcctaggttgtggccccaggcattgggcattttgnaagccccccaggtgttttcagcttgcagccaggccgagagagagcccctgagtcagatccccatggtttaggcacacctagcgggaggggtggctcctggaccccaccgtggttggagagctgagcatgtgtgtggctttagtggggtctgttagttatgggggtctgggcactggagctgcaggacacttgggatcccaggtcagaaagggccagatgagcaactaggaaagacttgggggccagggcggagtggggtcacctgacactcttgtgaggccccttctagtgcctgctcacaccggaatttcattcactccaagaagccatcaggggtaagataccttcctttaaacgtcactaagaaagaagaggcctgccggtgacacagtaagatgccattgatctaaagatgcgtcttgatttcagaaaggtccggaagtggaaagcaggtttcagggctgctgaggtacagggttctcctgtaggccccagggatggtctcaggggtgctgagtgcgtgcgtggtaaatggatggagcccaggggcgcctcctgccagtgtcctccaggcactcaaacctagcccttctgaagccgacctcacgtgacctcacagcccctcctgaaggcgcctcactgatgacggtgggtggaataacagcccccagagatgtccaggtttggaaccccaggacgtgggaaagtgttaccttgcgtggcaaaagggacccggcgcctgtgcttcagttcaggatttcgtggtggggagatgaccgtggatggttgaggtgggccctgagtaatcatgggggcccttataagggaaggggagtcacgagggtctgcgcatgaagcaaggaagcttctggctgtgaagatggcaagaargcctggggccaggcgatgaggtggcccctggaggagctggaaaaggcattggattctgccccagagcctccgtggagaaacaaagccgcactgacaagacttcagcctggtgaaaaccattttggactcctgacctctagaactgtaagataataaattggtgtggttttcaacctctcaaaaaaaaaaaaaaaaaaaaaaaaaaaaaaaaaaaaaaaaa

SEQ ID NO: 92 - DNA, 503 bp, Homo sapiens
  SITE (349): n equals a,t,g, or c
  SITE (418): n equals a,t,g, or c
  SITE (465): n equals a,t,g, or c
  SITE (488): n equals a,t,g, or c
gtgatgtggtagatccttatgtctatgttgaaatccatggaatccctgctgattgtgcagaacaaaggacaaaaacagtgcaccagaatggagacgctcccatttttgatgaaagctttgaatttcaaatcaacctgcctgaactggccatggtgcgctttgtagtgctggatgatgactacattggggatgaattcatcggccagtacacaattccctttgaatgtttacagacgggctaccgccatgtccccctgcagtccttaactggagaggtccttgcacatgcttctttatttgtccacgtggctattacttaaccgaagagggaggaggggaagccttcatnaaaagggggcctttcttgttgaggaaaaggggaaggaaatccagggggaatatggcatcttttgaggancactgtgggatttaaaaccgtgggatggagggtatttcaaggattgncccagcccccctattacgggggnttgcccacagatctt

SEQ ID NO: 93 - DNA, 422 bp, Homo sapiens
  SITE (98): n equals a,t,g, or c
  SITE (366): n equals a,t,g, or c
  SITE (394): n equals a,t,g, or c
tttacccggcagttggagccagagaggaccgaatgagccacccctccggaccctattcccaagcatctgcagctgccccccagcctgctgcagcccgncagccaccacccccagaggaggaggaagaggaagccaacagctacgattcggatgaagcaaccaccctgggtgccctggaattcagccttctctacgaccaggacaacagctccctgcagtgcaccatcattaaggccaagggcctgaagcccatggattcaaatggcttggctgatccctacgttaagctgcacctcctgccgggagccagcaagtccaacaagcttcgtacaaaaactctgcgggattacccggatccccatctgngaatgaggaccctcgtgttttcacgggnattcaccgatggaggacatggcaaaagg

SEQ ID NO: 94 - DNA, 2919 bp, Homo sapiens
  SITE (1): n equals a,t,g, or c
  SITE (3): n equals a,t,g, or c
  SITE (6): n equals a,t,g, or c
  SITE (14): n equals a,t,g, or c
  SITE (1033): n equals a,t,g, or c
nanttngcaattanccctcactaaagggaacaaaagctggagctccaccgcggtggcggccgctctagaactagtggatcccccgggctgcaggaattcggcacgaggcttcatgcgcgtcagcctgctgccggacgagcagatcgtgggcatttctcggatccagagaaatgcctactccatcttctttgatgagaagttctccatccccctggatcccacagccctggaggagaagagcctgcggttttctgtatttggcatcgatgaggatgagcgcaacgtcagcacgggggtggtggagctgaagctttctgtgcttgacctcccgctgcagcccttcagtggctggctctatttacaggaccagaacaaggccgccgatgctgtgggggagatcctgctctccctcagctacctccccacagccgagcgcctcaccgtggtcgtggttaaggccaagaacctcatctggaccaacgacaagaccacagcggaccccttcgtcaaggtgtacctgctgcaggatgggaggaagatgagcaaaaagaagacagccgtgaagagggatgaccccaacccggtgttcaacgargccatgatcttctcggtgccagccattgtgctccaggacctgtctctccgcgtgacggtggctgagagcagcagcgacggccgtggggacaacgtgggccatgtcatcattgggccgtcagccagtggcatgggaaccacacattggaaccagatgttggccacgctgcgcaggcccgtgtccatgtggcacgctgtccggcgaaactagcaaccagggcgggccagttgggcaatggagctgctggagcccggtacccactcagctctgtctgatgccctctccatagcccagctggagccgtgaacactggggtcccctggcagagtcctcatgacccatcctggtctctctgtccagattgcagcagaggagtgggcgtggctctgtgtccagggccccagggtctgctcctgctgaggaccagctgtggctggnccaggacagaggactcaaccctgctcctcccggtaggccagctgccgagccgggctatgttctggaacccagtgaatcttgggggccaggcactgtgctaggcaccagcaggggtaacacgaagaagacccggcccttagggcatcaggaagactagctcccctgccccggaggatctgctcagtgctgatggcagcccagctgtgtggactcagggggctctgagggctagggaaacaggaagggcctctttgacaaggtaggagctgtgcttggaggggcaggaaaagaactgagcatgtcgcaggcagcgggcccagcctgagcaatggcaggatgtgaacttccccatcgcaaatgcagttctcagcccactgcagtggatacaaggaagggcctttctcggkgccggagaagagaccaagagaccaggcccgggcagcagcctaccggccacgtggaacactggctccggagttattctctgtcaaatctactccccggacctcaaccatggcaagaaccagaggtccaaagaggcccagacccaggtccttgtgctcagtcctgcgcaaaccaggcccagaccctgcaagcatttgttgatgcccttgcaggcccactgggagaaagatgcctcaggcaggtctcagcctgggggtggcaggggtggggcakagagaatactgacagcagaggtcttggtgggctgcacgtgcctgcgaagatgtggtggacaaggaggctctcgggctgggccttggaggggtggcagcggaaggacagcccaggtggctgaggcctgatgggaagccggggaaggccagggtggaagggcggcttgagggacgccaggagaagactgaatgccaggctaggaaggaggcggctctcgatcacggggtgggtgcccccgacaccgggtctcctagcttgagttccctagaagcgaaatctgagagggggattctggggcaagtagtttcttgcgggtgagtgttctcagagaaacttaccagatcaagaaagggagctcaggctggatggaggaagccacgcaagtgtggcttcaagatccatcgccttggcctgatcgctgtgggggcaggggcctggagtacgaggggcaccctgggggctcccacccagaagcagaggggctgggctgttgcacctctactggcatcagtctttggttaccccccagccccagtaggaggagagcaggcagagcttgtcatccccagcctggtgtcccgcagtcccaggaagccgcttcttgccttcatggctgagtgctgggaagggctgagctcacccaggccagcaggtggggtatcatctgctcggtggggccacccacaggtgacagcatggaccctcaggctggctgcccctgttccttggtccataactggtgagctatggagacccaggccaacaaattatccccagtgatatggggggaggaggggctagaacaagggcccaggggactggaggcaggatggtggctttccctacctgacacagccatggcccagccccaaggccaggctgtctaccctatggccacagcaggaggtcagcccagggccaggagacacatggctggacaaggctttgcagcctgggagaccccgactttctctaacccagtggctgtgcggtgcaggccactgactccccccctgccctctcccctctctccctccccctaactgcatgacatgttaactgtgtgcccaggacagccgtggtggggaccgggtatgccaactggaatgattctagaaccaaaataaagttggggcaggaagagggggcttccagggagccctgctcggccctgaatcaccttcgtctcttctctaggaaaaaaaaaa

SEQ ID NO: 95 - DNA, 772 bp, Homo sapiens
ttttttttttttttttttttttttttttttttttttgctcttagaatagactttattgactttagccaagggcaggccctgagatgggggtccagagagagaggcttggtggggctacgtcctgggggccaggttggttctgaggggtagaaggccatccacccaytcgcacggctgctccaggagggcttgccacagctgcttctcctcaggtgtggaatccatccagggcacctgcagcccatagctgctgccggtgcccaggctgaggcgtgtgccycccagctggcggttggccagggccccatggtcccagagggagagctcggcacaagcctggcgcaggtcagcaggcccaaagccatcgtacaccatggtgtgattgaacacagggctgaggctgcgtcgcacaacccttgtacgctggcggctggccyggctgtcatcaggcagcacgaagcattgtacgtaagtgtccagggatcctgcccgcagcggcaggaggtcccgagcctccttcacccagaagtgcagctccccgctcgggggcagtcctgcgccctcggagccggcggggacgtacttgagggacagggcgagtaacccgcggctcggaaggtcgtcgggagagggtgggacctgcgagaggcgggcttatcgtggagcaggggctaatggaaaggggcctcaggagggtkgggtctgcagacccggatggggtgcggctagaagagacggcggggcctgcaggggcagaacctaggggtcctag

SEQ ID NO: 96 - DNA, 666 bp, Homo sapiens
  SITE (584): n equals a,t,g, or c
  SITE (615): n equals a,t,g, or c
  SITE (663): n equals a,t,g, or c
taaaaaagtgtgtactgtttaatgtactctgttgttacaggaaaacaacagcatggtgttacggttggataactcaggacatcacaaaaatgttaacaacggtgtctacctaaacagtcatttctagtgcaagcagtaataatgatgaaaagttaaaatatattagatacgttatagtacgtattaggcactgaagaaatactgtttggaaagaatgactagagcctgagaaattggtgcatcatattctccaggatatgtacaaaaccaagaaaaagaagactcgagttattttgcgaatgttacccatctcaggcacatgcaaggcttttttagaagatatgaaaaaatatgcagaaacatttttggaaccctggtttaaagctccaaacaaagggacatttcagattgtgtacaaatctcgaaataacagtcatgtgaatagagaagaagttatcagagaattggcaggaatagtgtgcaccctcaattcagaaaataaagtggatctcaccaatccacagtacacagtggtagtagaaatcatccaaagctgtctgttgcctgagtgttgtgaaaggttncatgttgtttaggaaattacatttttccggnggtggttgaggagccctagggttccttcacagtttaacttaaaggccnggg

SEQ ID NO: 97 - DNA, 795 bp, Homo sapiens
  SITE (579): n equals a,t,g, or c
  SITE (787): n equals a,t,g, or c
gctggggaaggtgcagggggcctgggagactgcctctccgaagcggtgaaaccctcacccttccgtccctcccagccaccctccctaaaacttcccctgacagagggtggcagccccaggctctttgcataatcctgtggcttcgctgtcttcacccagcaccagcggacagggaagggcagagaaggccaccatggcgacactcctctcccatccgcagcagcgccctcccttcttgcgccaggccatcaagataaggcgccgcagagtcagagatctacaggatcccccgccccaaatggccccggagatccagcctccatcccaccacttctcccccgagcagcgggccctgctctacgaggacgcactctacactgtcttgcaccgcctgggtcatcctgagcccaaccatgtgacggaggcctctgagctgctgcgatacctgcaggaggccttccacgtggagcccgaggagcaccagcagacactgcagcgggtcagggagcttgagaagccaatattttgtctgaaggcaacagtgaaacaggccaagggcattctgggcaaagatgtcantgggttcagcgacccctactgcctgctgggcattgagcagggggtaagtgtgccarggggcagccccgggtcccggcatcgcagaaggctgtkgtgargcacaccatccccgaggaggagacccaacgsamgcargtyatyamccagacactcaacccgtctgggacgagaccttcatcctggagtttgaggacatcaccaatgcganctttcatc

SEQ ID NO: 98 - DNA, 3044 bp, Homo sapiens
  SITE (1239): n equals a,t,g, or c
agactgcagtccggcccaggagagaagtggggaggcggcggtgggggcggggcggcgtccggctctragagagctgggggaggagcgcggcggcgacggcggcggtggctctagaaggggaggtggaggatctcctttcctcttctcagacccgggagcgtccgggacgcggagcccggagctggggcgacgaggcgattgcgggggcctgggctagctgctggctaccaatattctactttctgtctctatgaatgtgactaccctggttacctcatataatctccctggaaaaggagacatgaatgtctgcaatgatacttcctgacaagaagttgatacaagaaaaggaaaggagattaacagctagtgagcagaatttcgaacagcaggatttcgtattttttgcttccaactgcacacttccgttgcccacttttaaatcagagatacctacactcaaaacccagacaaggcaaaaggatacttttcttgtatattttttgagatcgaagaaacgacaatgtccaggaaacagaaccagaaggattcatcaggattcatttttgatttgcagtccaataccgtactggcccagggaggagcttttgagaacatgaaagagaagataaatgcggtacgtgcaatagttcctaataagagcaacaatgaaattatcctggttttgcagcactttgataactgtgtggacaaaacagtacaagcattcatggaaggtagtgccagtgaagtactcaaagaatggacagtaacaggcaagaaaaagaacaaaaagaagaaaaacaaaccgaaacctgccgcagaaccaagtaacggcatcccagattccagtaaatcagtttccattcaagaggaacagtctgcgccttcctcagagaaaggtggtatgaatggctaccatgtcaatggtgccatcaatgacactgagtctgtggactcactcagtgaaggtttggagacactttcaatagatgccagagaattggaggatcccgagtctgccatgctagatacgctggatagaacaggatccatgctgcagaatggtgtctctgattttgagaccaagtctttgactatgcactctattcacaattctcaacaacccaggaatgctgccaaatctctctcaagacctaccacagaaactcagttttcaaatatggggatggaagatgttcccctcgccaccagtaaaaagctaagttccaatattgnaaaaatctgtaaaagacctccagcgctgcacagtgtctcttgcacggtatcgagttgtagttaaagaagagatggatgcctccattaagaaaatgaaacaagcctttgctgaattggagagctgtttaatggatcgagaagtggcgttgcttgctgaaatggacaaagtgaaagctgaagcaatggaaattttgctcagccgacaaaagaaggctgaacttctaaagaagatgactcatgtggctgttcaaatgtcagagcagcaattggttgagctcagagctgatatcaagcactttgttagtgaacgtaaatatgatgaggatctgggacgagtagcccggttcacctgtgatgtagagaccctaaagaagagcattgattcatttggacaagtgtctcatccaaagaacagctattcgaccagatcccgatgtagctcagttacatctgtgtccttgagtagcccaagtgatgcctctgctgcttcctcttccacctgtgcctctcctcccagccttacaagtgctaacaagaaaaactttgcaccgggagagactcctgcagccatagcaaactccagtggccagccctaccagccacttcgggaggtattgccagggaacagacgaggaggacagggctataggccacaaggccaaaagtccaatgaccccatgaaccaagggcggcatgacagtatgggtcgttacagaaacagctcgtggtattcatctggttccaggtatcagagtgctccatctcaggcaccaggaaacaccattgaaagagctttggcggctcgmacgtcatgcaggtcatctacacggacgacgccggcagccccagactgcctacctgcagtgcaagtgtgtgaatgagcttaaccagtggctgtctgcgctgcggaaggtgagcatcaacaacaccggactgctgggctcctaccaccctggcgtcttccgtggggacaagtggagctgctgccaccaaaaagagaagacaggtcagggctgcgataagacccggtcacgggtgaccctgcaggagtggaatgaccctcttgaccrtgaccttgaggcccagctcatctaccggcacctgctgggcgtggaggccatgctgtgggagaggcaccgggagctgagcgggggcgcagaggcaggcacggtgcccacgagccctggcaaagtccccgaggactcattggcccggctgctccgggtgctgcaggacctccgcgaggcccatagctccagcccggccggctccccaccctcagagcccaactgcctcctggagctgcagacgtgaggcccgccctacgctccccttgctgagtcccctgccaagcgctcggagcccccccaggacactctgcaccccctcaccccggtcctcctcattagggtgcagggcctaggtctcttccaggtgggggaggggggagagtcaggaataaggggatccccagaagtgcagagctgagcaggcttgggcctgtcatggctggccggaagtgtccccagctccctacagacgctgtagccatcactgcctctccagggaccctcctctcctgcccaggacagacccagccagaaccactgctaggatgggccgcacccaggggtctggcctccagggacctagagaatgggagggagaacggggccccaggagacccggccgccaccccacccgctacccttgggtgccacagggctgtgctgttgccaacagtaaacctgctcttactgtccaaaaaaaaaaaaaaaaaaaaaaaaaaaaaaaaaaaaaaaaaa

SEQ ID NO: 99 - DNA, 889 bp, Homo sapiens
  SITE (458): n equals a,t,g, or c
gctctggagaggcaggcacaggggcaccctgtggccgtatcagcttcgccctgcggtacctctatggctcggaccagctggtggtgaggatcctgcaggccctggacctccctgccaaggactccaacggcttctcagacccctacgtcaagatctacctgctgcctgaccgcaagaaaaagtttcagaccaaggtgcacaggaagaccctgaaccccgtcttcaatgagacgtttcaattctcggtgcccctggccgagctggcccaacgcaaactgcacttcagcgtctatgactttgaccgcttctcgcggcacgacctcatcggccaggtggtgctggacaacctcctggagctggccgagcagccccctgaccgcccgctctggagggacatcgtggagggcggctcggaaaaagcagatcttggggagctcaacttctcactctgctacctncccacggccgggcgcctcaccgtgaccatcatcaaagcctctaacctcaaagcgatggacctcactggcttctcaracccctacgtgaaggcctccctgatcagcgakkggcggcgtctgaagaagcggaaaacctccatcaagaagaacacgctgaaccccacctataatgaggcgctggtgttcgacgtggcccccgagagcgtggagaacgtggggctcagcatcgccgtggtrgactacgactgcatcgggcacaacgaggtgatcggcgtgtgccgtgtgggccccgacgctgccgacccgcacggccgcgagcactgggcagagatgctggccaatccccgcaagcccgtggagcactggcatcagytagtggaggaaaagctktkaccagyttyacaaaaggaacaaaggctttttaggggaag

SEQ ID NO: 100 - DNA, 1774 bp, Homo sapiens
gcgcctcctgcccgatccgcgctgaccctgcgcgggacgcagccccaggcggctgcctagccgaggcgggagcccgagctgagtcgagctcgccggagcggctgtgctggatgccctggaggaacaaggaggcctccagtccctcttctgctaatccccccttggaagccctccagagccccagcttcagaggcaacatggcggacaagctgaaggaccccagcaccctgggcttcctggaggcggccgtgaagatcagccacacgtccccagatatcccagctgaggtgcagatgtcggtcaaggagcacatcatgcgtcacacccggctgcagcggcaaactacagagccagcgtcatccaccaggcacacgtccttcaagcgccacctgccaaggcagatgcatgtctccagtgtagactatggcaatgagcttccaccagcagcagagcagcccaccagcattggccgcatcaagcctgagctctacaagcagaagtcggtggatggggaggatgccaagtctgaggccaccaagagctgcgggaagatcaacttcagcctacgctacgattacgagaccgagaccctgattgtgcgtatcctgaaggcttttgacctccctgccaaggacttttgtggaagctctgacccttatgtcaagatctacctcctgcctgaccgcaaatgcaagctgcagacccgggtgcaccgcaagaccctgaaccccacctttgatgagaayttccayttccctgtgccctatgaggagctggctgaccgcaagctgcatctcagtgtcttcgactttgaccgcttctcccgccatgacatgattggcgaggtcatcctggacaacctctttgaggcctctgacctgtctcgggaaacctccatctggaaggatatccaatatgccacaagtgaaagcgtggacttgggagagatcatgttctccctttgctacctgcccactgcaggcaggctcaccctcacagtgattaagtgtcggaacctcaaggcgatggacatcacaggctattcagatccctatgtgaaagtgtccttgctctgtgatgggcggaggctgaagaagaagaaaacaaccataaagaaaaacactctcaatcctgtctacaatgaggccatcatctttgacattcccccggaaaacatggatcaagtcagcctgctcatctcagtcatggactatgatcgagtgggccacaatgagatcataggagtctgtcgtgtggggatcactgctgaaggcctgggcagggaccactggaacgagatgctggcatacccccggaagcccatcgcacactggcactccttggtggaggtaaagaaatccttcaaagagggaaaccctcggttgtgatttcattcacgtggatgctgcaagcagagagactgccacctggagttaggatggcagggccgagctgctagcttcgacagtgagagctcgtgcccatctccgaaaccacctccaacaccatgagatgtgcagccaaataacacaaatgggactcagcaatgttctctttgcacttgttcaaccgtctaaacagtgttgtgcagtcgcagtggcggcagcagcggcagccgtccgtcactccagagtcttacctgctcctgtgtaggtcaaggctgagacacttgtcatgtggtcagatctgtcttagtcttttgtgtctcccaaggtgatgtttttgtggtttttcactttttatgggtctgctggtaagaaaagggaaaaaaaaa

SEQ ID NO: 101 - DNA, 399 bp, Homo sapiens
gaggaagtggaagaagagaaagacagccaccaaaaagggcacggcggccccctacttcaatgaggccttcaccttcctggtgcccttcagccaggtccagaatgtggacctggtgctggctgtctgggaccgcagcctgccgctccgaactgagcccgtaggcaaggtgcacctgggtgcccgggcctcggggcagcccctgcagcactgggcagacatgctggcccamgcccggcggccattgcccagcggcamcccctgcggcagccagggaggtggaccgcatgctggccctgcagccccgmcttckcctgcgcctgcccttgccccactcctgaatgcaccacatgcctctgtctccccgctgagcccaggcacttgcccaggccgccctgcagg

SEQ ID NO: 102 - DNA, 862 bp, Homo sapiens
  SITE (735): n equals a,t,g, or c
  SITE (777): n equals a,t,g, or c
  SITE (810): n equals a,t,g, or c
  SITE (840): n equals a,t,g, or c
gcacgagggagtgccatcagctggcctatgctgatgaagccaagaagcgctctaacccatatgtgaagacttaccttctgcctgacaagtcccgccaaggaaaaagaaaaaccagcatcaagcgggacactgttaatccactatatgatgagacgctgaggtatgagatcccagaatctctcctggcccagaggaccctgcagttctcagtttggcatcatggtcgttttggcagaaacactttccttggagaggcagagatccagatggattcctggaagcttgataagaaactggatcattgcctccctttacatggaaagatcagtgctgagtccccgactggcttgccatcacacaaaggcgagttggtggtttcattgaaatacatcccagcctccaaaacccctgttggaggtgaccggaaaaagagtaaaggtggggaagggggagagctccaggtgtggatcaaagaagccaagaacttgacggctgccaaagcaggagggacttcagacagctttgtcaagggatacctccttcccatgaggaacaaggccagtaaacgtaaaactcctgtgatgaagaagaccctgaatcctcactacaaccatacatttgtctacaatggtgtgaggctggaagatctacagcatatgtgcctggaactgactgtgtgggacccgggagcccctggccagcaatgacttcctgggaaggggtcaggcttggtgntggcactgggatcaggaattgggggaagtggtggactggatngactcgactgggggaagaattgagcctgtgcanaagatgcgacagtccccagggcttgggcanaaggactttggagctccgtcct

SEQ ID NO: 103 - DNA, 836 bp, Homo sapiens
  SITE (3): n equals a,t,g, or c
  SITE (5): n equals a,t,g, or c
  SITE (824): n equals a,t,g, or c
gcntntggtcctcagctttgaccgcttctytcgggatgatgtcattggcgaggtcatggtgccactggcargggtggaccccagcacaggcaaggtacaactgaccagggacatcatcaaaaggaatatccagaagtgcatcagcagaggggagctccaggtgtctctgtcatatcagcctgtggcacagagaatgacagtggtggtcctcaaagccagacacttgccgaagatggatatcaccggtctctcaggtaatccttatgtcaaggtgaacgtctactacggcagaaagcgcattgccaagaagaaaacccatgtgaagaagtgcactttgaaccccatcttcaatgaatctttcatctacgacatccccactgacctcctgcctgatatcagcatcgagttcctcgttatcgacttcgatcgcaccaccaagaatgaggtggtggggaggctgatcctgggggcacacagtgtcacagccagtggtgctgaacactggagagaggtctgcgagagcccccgcaagcctgtggccaagtggcacagtctgagcgagtactaatcctgttcttctctcctctaatccccgggggccaagctggggagggatgtggaggggaaaaagatgacagagaagtggmttccaaacctcattttagttgttagaagaaatttcttacaaaacaattccacaaagaacacctatatgaccacagttgcagatcattcttagcatgatgtttttttttctgtttgcaaggcgttagatcttttattttatttattttttttgaggtggggtttcgtcttgttgccgngttgggtgcaat

SEQ ID NO: 104 - DNA, 1718 bp, Homo sapiens
ccacgcgtccgtgaaatagcattttctctccttttcccagcactagtatataacctatgaggaacccttgtctctgaatctgctcagcttgaaattttgtctctgaaagaagttggtgacattaaggcatctacagagatgaggttaagaagattccagtcagtggaaagtggagcaaataacgttgtcttcatcaggacacttgggatagagcctgagaaattggtgcatcatattctccaggatatgtacaaaaccaagaaaaagaagactcgagttattttgcgaatgttacccatctcaggcacatgcaaggcttttttagaagatatgaaaaaatatgcagaaacatttttggaaccctggtttaaagctccaaacaaagggacatttcagattgtgtacaaatctcgaaataacagtcatgtgaatagagaagaagttatcagagaattggcaggaatagtgtgcaccctcaattcagaaaataaagtggatctcaccaatccacagtacacagtggtagtagaaatcatcaaagctgtctgttgcctgagtgttgtgaaagattacatgttgtttagaaaatacaatctccaggaggtggtgaagagccctaaggatccgtcacagcttaactcaaagcagggaaatgggaaagaagctaaactggaatctgcggacaaatcagaccaaaacaacacagcagaaggaaaaaataaccagcaggtaccagagaatactgaggagctggggcagacaaaaccaacgtctaatccacaggtggtaaatgagggaggagccaaacctgaacttgcaagtcaagccacagaaggatccaagtcaaatgaaaatgacttctcataggaagtcatttggtgttggagctgacagtccagtgtcgcaattttggaaggcaagatgtgagagagacgagaaccattttaggcatagaactacagacatttctgaaaaggttggtgatgaagaacttcagtcttctgagtatacttcagtatactagtgcaacaagggacacaaagaaattctgtcttaataaagaaagctacttctcaagggtattatgtggactcagtccaagctctcctgtcccattgtgcattgtctgtgacatgcaacttacaaaactagcaattgtaacaataaatcacagccacttgacaagaaaggatattcattattttcaaatggcttttggactatcaaaaacagtaaggcttttgttcagaaatcacctttagtcaaaaggtttaagaagcaaattatttagtagcagaacttatctcaggaaaggaaaatatgcatggttggtgagaatctaataacattaaaatgctggggcaagatgcagtacaaagttgaagagactttattctcaataagttgatttactgatgatatgtcatatgatgcaaaaaaggttttgtgtcattaactgaaaagtagcagcttctctatccaggatgatgagtcaacaggtttcactaatatttgtcatgctgtagcatttgtaagatttgtaaatgatgaaattcaaagaaaactttttctattgctaggagcctgccagaacaaaggccaatatataatgttgtgacatcatatctgataaccagaggtctggtatctacactcctggtgccccatcagtggttgtctccataagtcattttgcgttattaaaaaaaaaaaaaaaa

SEQ ID NO: 105 - DNA, 835 bp, Homo sapiens
ccaaatcctgggttgcagcagagaaaatgtaccacactcatagacggcgaaggctggtccgaaaacgcaagaaagatttaacacagactgcttcaagcaccgcaaggccatggaggaattgcaagaccaagagggctgggaatatgcttctctaattggctggaaatttcactggaaacaacgtattcagataccttccgccgcagacgctggaggagaaaaatggctccttcagaaacacatggtgcagctgccatctttaaacttgaaggtgcccttggggcagacactaccgaagatggggatgagaagagcctggagaaacagaagcacagtgccaccactgtgttcggagcaaacacccccattgtttcctgcaattttgacagagtctacatctaccatctgcgctgctatgtctatcaagccagaaacctcttggctttagataaggatagcttttcagatccatatgctcatatctgtttcctccatcggagcaaaaccactgagatcatccattcaaccctgaatcccacgtgggaccaaacaattatattcgatgaagttgaaatctatggggaacccaaacagttctacagaatccacccaaagktatcatggaactttttgacaatgaccaagtgggcaaagatgaatttttaggacgaagcattttctctcctgtggtgaactgaactcagaaatggacatcacacccaaacttctctggcacccagtaatgaatggagacaaagcctgcggggatgttcttgtaactgcagagctgattctgaggggcaaggatggctccaaycttcccattcttccccct

SEQ ID NO: 106 - DNA, 1429 bp, Homo sapiens
  SITE (150): n equals a,t,g, or c
tttttttttttttttcctggagccactaaaatttattataatggttagcattcaacaataagtgatcaaacacaccacaaaacaggaagaaggggaaaacagacacaacaaaacggagccactaatgacccagatattggtgttatcagnccagacttgatgggtgaattagagcctttcatcaaagaactggaatcttggaatgtgggggtggctggcatctatccggatgtcagatgaaacagaaacagttccactgtagtagcctgcttgtccccttccatgttctgcaccacagtcaggctgaggctagcggtatccagctcggtggcatcggccttgaagctgaaggtctcattgtacacagggttgatggagcccagcacagctgaagtcttcttgcacttgacaaacttgttgtggttcatcagagacactttgacaaacacacctagggaacgagggattggatcaagctggggcgagatagagtggggaagtgatgagctaagaaaaattagcctgcaagcatgacgtgtcgcacgtcagcaaggctgcagccttggattctgatgtcttgagaagagcgattcacctgtgaattctcacagccctggcctcagaaagacggcccgggaccaggcccgatggcacccctcttcccagctctcagccagggcggaaggcacaagtgatggccctggcctccgcagtcacactcctcctgaaagctgactggctgaacctcacctcttggctagcttgccacccagctcttgagaacatgtttgtccaaggcctcttggcaggtctcgatgactycttcccctaagggcccccagtcacctgctaaggctcccaggcccctgtgaaactggctcggtgccccaatagactctccacctccagaccctaagccggccagcccagagtgcagcaaggcaccacacctaccctgtgagggcactcgggccccgcgctggcctctgacagcacaggaagcttctgcattcacgctgaggcctgtcttttgccttccttggataaacttgccagaaaccccatagtgcttsaggcctttgggataattcccctgagccccataggccagggcctggcattcagtagttgctctaaaattgtgttttcacccactctcttccaggtagtcaggacagggaagcccaggcttctggtcaccactcaccaaatctctcccctgcccctctatcagggatcagctcctataggccttaacctagcagactaggtaaagcagagctggtggcatcaagggtcccgggggctgcagagccctggctggtacaggaggctgggctctcctgtaggtctgcaccttcccagcaacgcggagggcaccagaccctgcctgctccagaggctgtacctgaaagatgaagtgctcgtc

SEQ ID NO: 107 - DNA, 1704 bp, Homo sapiens
tcatgtacagcacacagcagggaggcctcattgtgggcatcatacgctgcgtgcacctggctgccatggacgctaatggctactcagacccattcgtcaagctctggctgaaaccggacatgggaaagaaggccaaacacaagactcaaattaaaaagaaaaccttgaatcccgaattcaatgaggagtttttctatgacatcaaacacagtgacctggcaaagaagtcactggacatttcagtctgggwctatgacatcggcaagtccaatgattacatcggaggctgccagctggggatctctgccaagggagagcgcttaaaacactggtacgagtgtctgaaaaataaagacaagaagatagagcgctggcaccagctacagaatgagaaccacgtgtcaagtgattaggctagtgcccaggtccccatctccatgtcccgggtcccccccagcctgctctagctgcccaccgcaccctgatctctcttctctatgcctacctccccccataccctgctgatctccctgagcctgcctttgagcccccgtcacgttgggcactgctgccwaagactccctcctccctgatgctgggatgtgggctctgaatacagcccctctctcatccckgggatggagcaatggggatggggttggggagacgtttacaaagaggttgatcatttaataacctctcagtttgggtaaattacaaaggttcttcatcatttaggactgtttttagaccctcctagccttgaacacacacatgtacacayacacacacacacacacacacacaccctttcattccctgtgttgtgtctctgtatatccccagttgtcagcagacccggacaatgctgtgagagaagcattggggcacaaatagagcctccgggctcccactgccccctgagatgtacaccctgattgccaggaaaacagactgctgtgttcagtaacacaccctccctgctccaagtgcaccaggatgcaaatgcacagaattcaccaggggcttggacgctctcctctttccgaatgtsacctgtgtgcttcctagcaaarcaaaaacaaacgacaacaacaaaaaacccttcctctgtcaccttttctcctcctccctcttctttcccttccatgatagtagattctctctttctcagcctctcccctctcctttctctccctgcctttcttccctttgcctttctctctctctaaagcagtaacaccgcaaaaacracagcaaaaaaagtgtatgttaacctagcctcacccccttgctctcaccagcctgaccaggaaactgagaaactggcccaaacctgagattccacttgggcccacgcttcttaactgacccactcctcccgttggcagaaccagacattcccagggcttgggccaatggctggcactgccctgagtgcatggcagcatccctcaagctgtgtagatgccccatagaggactctctcatccgtgggctccccgggtgggcacggaggcatttagaagaccagggccatgggtctgaggaagcctcagccaaagcctccagcctttctcctttctccgstcttaggtaaatgaacaagctaccctcctccccaatgccttgratctgtttcatgaytcttttggcatcccatcttctcactcagaaccccctccagtctctctggtctctctt

SEQ ID NO: 108 - DNA, 299 bp, Homo sapiens
  SITE (295): n equals a,t,g, or c
gaagtgattgagggccgacagttaagtggtaacaacataaggcctgtggtcaaagttcacgtctgtggccagacacaccgaacaagaatcaagagaggaaacaaccctttttttgatgagttgtttttctacaatgtcaacatgaccccttctgaattgatggatgagatcatcagcatccgggwttataattctcactctctgcgggcagattgtctgatgggaatttaagattgatgttggatttgtttatgatgaacctggccatgctgtcatgagaaagtggcttcttctnaatg

SEQ ID NO: 109 - DNA, 1645 bp, Homo sapiens
gtagagtcwgcgctgatgcctggcccaccttgagctgcctgtggatcctgaagtgaaagctctggttccagacagggctactgctgttcttgaccgtgcgtgtctggagcctgtggctgcaggccgtgggcagccagagagtcacgtagcagtcagagggggtcactgcgggaaggaacaagtgcccagcggtggacaagagcccttcccagccgcccagacccacttccttccatcacctagagccccatgtgggttaagactgagggggaggggaagtgggggccagaggcagagccccagctgccaccttccacccagaagctcctctcagctccctcctctaggccctgcccaccggcccacccgcctccaccaaatccagccacagyaccctcctcctcagcaccctcctcctccctcagcccagcacaggggccagggcggtgcgcactcacctaggtccttagagggtaggcgatgggcctgcaggacacgaaccgtgagcaggcaggtcctggacacctctgcctgcagaggtgggagaggggagacytgytacggsccgatgaagccaagggtgacagggsccacaaaggaggctggagcagtgcctcaaggcctaatcctgaaccccaggcccatcctccatctcatcagaatcctgaatcaayaagaggagacatsatatctccatcatgacgcctgccagcacttacacaatgctctgcgccggctctgggccaagggctttgcatacattaactcatttatcgcacaaccaccttatgcacagatactatttacgatggcccactccacaaggaaaytgaggcacagagaagcagycacttgcytgaggtccacaattggggttggagcccgggcaggctggctccagatttatgcctcacacagacctgcttccaccttctcgggctagtatcctttaggctctccacyccacatccccagmccacacyccagctaagcagctttccggctgtcttgggtggcaggggacataagctatcgagggaggggaagtagcacatcagggccttgggccccagrctgagctgctctcgtaccctccctccaccctggtcagaagagcatcctggaaatgggctctctcctgggcaggggaggcggctcctagctcagacccctcacaggctgtcatgtcctccaggtcctgccaggtcaggctgaagatggtcccccggtagctccctccaaacccatgcccctggttctgggaatgcagcctggcaggcgcaccgggaccagggaagcctgtgccaactgcttcctttcggccttccacctgcctccacaaggaccctaacaggtcaagtccagggagcaaccaggtccagggcagtgctggagggcctcatccaccagggtcagcccagggccctcacactccaggcaactgagtcagaggagcatggaggagccacttgcttccagggcctcagggcggcagctgggagcctctgagtctccagggcccaaatctgtggtgccagggagctctgccaggagcccgttcccaggacagaaaacactcaggacggatccctcatccccaagcctcctcctcccctggcttctgcccgctaccctggctcgtgcc

SEQ ID NO: 110 - DNA, 2223 bp, Homo sapiens
gggctgaaatgggagctcccgctatggcactggctcaaggagctaatctaaagaatcaagcaaaagtagataatcagccagaagaattagtgcgtagtgctgaagatgatgagaaaccagatcagaagccagttacaaatgaatgcgtaccaagaatttccacagtgcctacacaacctgataatccattttctcaccctgacaaactcaaaaggatgagcaagtctgttccagcatttctccaagatgaggtgagtggcagtgtgatgagtgtttatagtggagactttggcaatctggaagttaaaggaaatattcagtttgcaattgaatatgtggagtcactgaaggagttgcatgtttttgtggcccagtgtaaggacttagcagcagcggatgtaaaaaaacagcgttcagacccatatgtaaaggcctatttgctaccagacaaaggcaaaatgggcaagaagaaaacactcgtagtgaagaaaaccttgaatcctgtgtataacgaaatactgcggtataaaattgaaaaacaaatcttaaagacacagaaattgaacctgtccatttggcatcgggatacatttaagcgcaatagtttcctaggggaggtggaacttgatttggaaacatgggactgggataacaaacagaataaacaattgagatggtaccctctgaagcggaagacagcaccagttgcccttgaagcagaaaacagaggtgaaatgaaactagctctccagtatgtcccagagccagtccctggtaaaaagcttcctacaactggagaagtgcacatctgggtgaaggaatgccttgatctaccactgctaaggggaagtcatctaaattcttttgttaaatgtaccatccttccagatacaagtaggaaaagtcgccagaagacaagagctgtagggaaaaccaccaaccctatcttcaaccacactatggtgtatgatgggttcaggcctgaagatctgatggaagcctgtgtagagcttactgtctgggaccattacaaattaaccaaccaatttttgggaggtcttcgtattggctttggaacaggtaaaagttatgggactgaagtggactggatggactctacttcagaggaagttgctctctgggagaagatggtaaactcccccaatacttggattgaagcaacactgcctctcagaatgcttttgattgccaagatttccaaatgagcccaaattccactggctcctccactgaaaactactaaaccggtggaatctgatcttgaaaatctgagtaggtggacaaatatcctcactttctatctattgcacctaaggaatactacacagcatgtaaaagtcaatctgcatgtgcttctttgattacaaggcccaagggatttaaatataacaaaatgtgtaatttgtgactctaatattaaataagatatttgaacaagctaggaaaattgaatttctgctgctgcttcaaagaaaaagctgccccagagcattaaacatggggtattgttaagaagcaaaatgttcttgtttgccatcatgtgtttcacaccacaattctgtgccacagttaagagggtctggtacccttgcaggacctttgtaggttgtgggaaaaagtcgcagaaagatactcaaagtggagcagggaatggagacagacatcagtgatgataaaaaaaaaaatggaccttaagaaactatttactctgtaatctctaataaaatatggaattccatattagggcaatgagactgaaactactggtgtttttctgccttgagaaaacaaacagttaaaacaagcctcaaatgtattttagtgccacccactggccataggtacaattcagttgttggcttgttttgacttaattctaaaataggtctcaagcctgtatttttatgagtttatttttttaaaaccctgcatatatatgattgtttttcttataactttactatatgaaagcagcataagagtagtcacaaacatgttttgcaacaaagttttaattagaatgtaagttgctcagttatactgttcttcttatgtatgtaaaattttcgtattttgtaaaaacccttagaataaattatcatttgatttaaattgtattagaaaattagcgtgacttctmattytmaataaaatattttaggaattctaacattctaaaaaaaaaaaaaaaaaaaaaagcat

SEQ ID NO: 111 - DNA, 977 bp, Homo sapiens
  SITE (960): n equals a,t,g, or c
gggcggggcgcggcggctgtcagctgactgtggcggcggcggcctcgaggtgacaactgtctccgtcgcaggctccggcgggggcgcaggaggtcgcccggcgcgtcactgtcgggtcggcgagccacgggggccgccgcagcaccatggcgaccaccgtcagcactcagcgcgggccggtgtacatcggtgagctcccgcaggacttcctccgcatcacgcccacacagcagcagcggcaggtccagctggacgcccaggcggcccagcagctgcagtacggaggcgcagtgggcaccgtgggccgactgaacatcacggtggtacaggcaaagttggccaagaattacggcatgacccgcatggacccctactgccgactgcgcctgggctacgcggtgtacgagacgcccacggcacacaatggcgccaagaatccccgctggaataaggtcatccactgcacggtgcccccaggcgtggactctttctatctcgagatcttcgatgagagagccttctccatggacgaccgcattgcctggacccacatcaccatcccggagtccctgaggcagggcaaggtggaggacaagtggtacagcctgagcgggaggcagggggacgacaaggagggcatgatcaacctcgtcatgtcctacgcgctgcttccagctgccatggtgatgccaccccagcccgtggtcctgatgccaacagtgtaccagcagggcgttggctatgtgcccatcacagggatgcccgctgtctgtagccccggcatggtgcccgtggccctgcccccggccgccgtgaacgcccagccccgctgtagcgaggaggacctgaaagccatccaggacatgttccccaacatggaccaggaggtgatccgctcctgctggaarcccagcgagggaacaaggatgccgccatcaacttccttgctgcaagatgggngaagagccatagagcct

SEQ ID NO: 112 - DNA, 582 bp, Homo sapiens
  SITE (125): n equals a,t,g, or c
  SITE (138): n equals a,t,g, or c
  SITE (382): n equals a,t,g, or c
  SITE (402): n equals a,t,g, or c
  SITE (448): n equals a,t,g, or c
  SITE (449): n equals a,t,g, or c
tgggctgagcaggaacttgtgagattccagagccctgactacaggtgatcagcggtcagcaactccccaaagtggacaagaccaaagaggggtccattgtggatccactggtgaaagtgcagatntttggcgttcgtntagacacagcacggcaggagaccaactatgtggagaacaatggttttaatccatactgggggcagacactatgtttccgggtgctggtgcctgaacttgccatgctgcgttttgtggtaatggattatgactggaaatcccgaaatgactttattggtcagtacamcctgccttggacctgcatgcaacaaggtgagccagcccctttgacccctggccaataccccagctctggctgccttcntaatgctgtcctcctgcccnttccaggttaccgccacattcacctgctgtccaaagatggcatcannctcagcccagcttccatctttgtgtatatctgcatccaggaaggcctggagggggatgagtcctgaggtgggcatttcacgggaagggttggtatgctggctttagacggggagaaacatctggaaggatgct

SEQ ID NO: 113 - DNA, 539 bp, Homo sapiens
  SITE (501): n equals a,t,g, or c
  SITE (504): n equals a,t,g, or c
  SITE (537): n equals a,t,g, or c
  SITE (539): n equals a,t,g, or c
ctcaaggccatggattccaacgggttgagcgatccctacgtgaagttccggcttgggcatcagaagtacaagagcaagattatgccaaaaacgttgaatcctcagtggagggaacaatttgattttcacctttatgaagaaagaggaggagtcattgatatcactgcatgggacaaagatgctgggaaaagggatgatttcattggcaggtgccaggtcgacctgtcagccctcagtagggaacagacgcacaagctggagttgcagctggaagagggtgagggacacctggtgctgctggtcactctgacagcatcagccacagtcagcatctctgacctgtctgtcaactccctggaggaccagaaggaacgagaggagatattaaagagatatagcccattgaggatatttcacaacctgaaagatgtgggatttctccagtgaaagtcatcagagcggaagggttaatggctgccgacgtcactggtaagagatgangcnaatctcctaatgctccagatcaagcagcacacnan

SEQ ID NO: 114 - DNA, 497 bp, Homo sapiens
caccatgaggacctgcgactctcccagaaggcggaggaggtgtatgcccagctgcaaaaaatgcttctggagcaacaagagaagtgcctgctgtctccaagcagtcatgcaccagggcaacgtggctgagaccacccgatttgagaagcttgctcaggaccgcaagaaacagctggagatcctgcagctggcccaggctcagggcctcsaccctcccacccaccactttgagttgaagacattccagactgtgaggatcttctcagaactcaacagcacagaaatgcatctgatcattgtccggggaatgaacctcccagcccctccaggggtgactcccgatgacctggatgcttttgtgcggtttgagtttcactaccctaactcggaccaggctcaaaaaagcaaaacagctgtggtgaagaacacaaactctccagaatttgatcaactcttcaaactaaacatcaaccgaaaccaccggggcttcaagaggg

SEQ ID NO: 115 - DNA, 377 bp, Homo sapiens
gaacatcctggacaagaattagagattgagctctttgatgaagacccagacaaggatgactttttaggaagtcttatgattgacctcattgaagttgaaaargagcgccttttagatgaatggttcactctggacgaggttcccaaggggaagctacacttgagactggagtggctcacgttaatgccaaatgcgtcaaacctcgacaaggtgctaacagacatcaaagctgacaaagaccaagccaacgrtggtctttcctctgcattgctgatcttgttacttgggattccagcaagggmaccttccggtagktaacacatggttaacaccgtgggtggcgtattttccccaggcagtgctcttgtttttaacca

SEQ ID NO: 116 - DNA, 322 bp, Homo sapiens
  SITE (297): n equals a,t,g, or c
  SITE (319): n equals a,t,g, or c
aattccgaagtttaaaatcggaggaaaagaagtttttagaagtaagataatacacaagaacctcaaccctgtgtgggaagaaaaagcttgtattctggttgatcatcttagggagccattgtatataaaggtatttgactatgattttggactacaggatgactttatgggstcagcctttctggatctgacacaattggagttaaacaggcccaywgatgtgacccttactctgaaagatcctcattatcctggaccatggatcttggaatccattttgctctcagtgcatccttnacccctgaaagraaggagagtncca

SEQ ID NO: 117 - DNA, 631 bp, Homo sapiens
  SITE (568): n equals a,t,g, or c
  SITE (579): n equals a,t,g, or c
  SITE (582): n equals a,t,g, or c
  SITE (624): n equals a,t,g, or c
cgaacttctctcccagggcggtgcgacccggagctccagcgcccgagtctccacttcgtttgctgaaacttgctttctaccagctaagaaccatgctgcgagtgattgtggaatctgccagcaatatccctaaaacgaaatttggcaagccggatcctattgtttctgtcatttttaaggatgagaaaaagaaaacaaagaaagttgataatgaattgaaccctgtctggaatgagattttggagtttgacttgaggggtataccactggacttttcatcttcccttgggattattgtgaaagattttgagacaattggacaaaataaattaattggcacggcgactgtagccctgaaggacctgactggtgaccagagcagatccctgccgtacaagctgatctccctgctaaatgaaaaagggcaagatactggggccaccattgacttggtgatcggctatgatccgccttctgctccacatccaaatgacctgagcgggcccagcgtgccaggcatgggaggagatggggaagaagatgaaagtgatgaagacaggttggacangcattcagggnccngggccaaggggcagtttggggacgtgtccgaagtccacttgntcggagg

SEQ ID NO: 118 - DNA, 342 bp, Homo sapiens
  SITE (134): n equals a,t,g, or c
  SITE (286): n equals a,t,g, or c
aattcggcacgaggtgaacagtaggcctgggggagaaattgccttcctgacaagaagagttggagatgatgaatacaaaacccctgggacactgcctggcccatagtgatgttaccatcagtagtggctttgcnktttccagattgacatccatgccctaaacagagaactttgctgagatgaaatttccttgttggtatacttttgtgaaccactccattgagaaccagcacaaagccattgccttcttgaacgtyttcattaaaactagaataatctctgcccntcatttgcccatgcacatggraaacccagggtatgcctttcctgatgggaaatatg

SEQ ID NO: 119 - DNA, 375 bp, Homo sapiens
gggcccgtcaagctgcgcctgacagtactctgtgcaaaaaacctggtgaaaaaggattttttccgacttcctgatccattwgctaaggtggtggttgatggatctgggcaatgccattctacagatactgtgaagaatacgcttgatccaaagtggaatcagcattatgacctgtatattggaaagtctgattcagttacgatcagtgtatggaatcacaagaagatccataagaaacaaggtgctggatttctcggttgtgttcgtcttctttccaatgccatcaaccgcctcaaagacactggttatcagaggttggatttatgcaaactcgggccaaatgacaatgatacagttagaggacagatagtagta

SEQ ID NO: 120 - DNA, 2272 bp, Homo sapiens
  SITE (10): n equals a,t,g, or c
aagcaatacnaagatgccatccgagcccacaaggctggccgagccgtggatgtcgctgaattgcccgtgccacccaggyttccccccaatccagggcctggrggccaccaagcccacccagcagagtctggtgggtgtcctggagactgccatgaagctggccaaccaggatgaaggcccagaggatgaagaggwtgaggtgcctaagaagcagaacagccctgtggcccccacagcccagcccaaagccccaccctcaagaactccccagtcgggatcagccccaacagccaaagcgccccccaaagccacatccaccagagcccagcagcagctggccttcctagagggccgcaagaagcagctcctgcaggccgcactgcgagccaagcagaaaaacgacgtggagggtgccaagatgcacctgcgccaagccaaggkactgkagcctatgctggaggcctcgcgcaatgggctgctgtggacatcaccaaggtgccgcctgcccctgtcaacaaggacgactttgccctggtccagcggcctggcccgggtctgtctcaggaggccgcccggcgctatggtgaactcaccaagctcatacggcagcagcacgagatgtgcctgaaccactcaaaccaattcacccagctgggcaacatcactgaaaccaccaagtttgaaaagttggcggaggactgtaagcggagcatggacattctgaagcaagccttcgtccggggtctccccacgcccaccgcccgctttgagcaaaggaccttcagcgtcatcaagatcttccctgacctcagcagcaacgacatgctcctcttcatcgtgaagggcatcaacttgcccacacccccaggactgtcccctggcgatctggatgtctttgttcggtttgacttcccctatcccaacgtggaagaagctcagaaagacaagaccagtgtgatcaagaacacagactcccctgagttcaaggagcagttcaaactctgcatcaaccgcagccaccgtggcttccgaagggccatccagaccaagggcatcaagttcgaagtggttcacaagggggggctgttcaagactgaccgggtgctggggacagcccagctgaagctggatgcactggagatagcatgtgaggtccgggagatccttgaggtcctggatggtcgccggcccacaggggggcgactggaggtaatggtccggattcgggagccactgacagcccagcagttggagatgacgacagagaggtggctggtcattgaccctgtgccggcagctgtgcccacacaggttgctgggcccaaagggaaggcccctcctgtgcctgcccctgcaagggagtcagggaacagatcagcccggcccctgcatagcctcagtgtgctggcgtttgaccaagagcgtctggagcggaagatcctggccctcaggcaggcgcggcggccggtgcccccagaagtggcccagcagtaccaggacatcatgcaacgcagccagtggcagagggcacagctggagcaggggggtgtgggcatccgacgggaatacgcagcccagctggagcggcagctgcagttctacacggaggctgcccggcgcctgggcaacgatggcagcagggatgctgcaaaggaggcgctctataggcggaatctggtagagagtgagctgcagcggctccgcaggtgaggagcccatggggcgggcagcccccagaaagcgggcagcaggccccgataccgggaagagccgacacagccacgaaccagacaagcagacaatcagcggacaatcggttctggactcacccctcatccgggcccccagccccgccagagcctccgtggctgcgggtgttgggaaccatgcctgccagccagtatgtgcccctcacccaggcctggctgggccctggagagtcctgtttgcacagcccaggggtgtccggcctctggcccgccccggagcagggagggtggctggggccaagccccgagggcccctgcaagcactttacttcctgttcctccccagccttaaccccaaagccctcctgcaccccaaagaagccactgaggctggccgagccacactgtctccccaggggcgtcgacctggcccagctgggtccccagggccagcacatggaataaaatagccagggccacactcaaaaaaaaaaaaaaaaaaaaaaaaaaaaaaaaaaaaaaaaaaaataaaaaaaaaaaaaaaaaaaaaaaaaaaaaaaaag

SEQ ID NO: 121 - DNA, 4835 bp, Homo sapiens
  SITE (1449): n equals a,t,g, or c
  SITE (2956): n equals a,t,g, or c
gcaaccatttatgttgcacttaatgatcatctgcactttttgcatatccttagtgttgtctttgaaactcaggttgaataattcatcaaattacacaactgaactcaagacatggctgcccagtgtgtcacaaaggtggcgctgaatgtttcctgtgccaatcttttggataaagatatagggtcaaagtcagaccctttatgtgtgtkgtttttgaatacaagtggtcaacagtggtatgaggttgagcgcacagaaaggattaagaattgcttgaatccccaattttccaagacatttattattgattactactttgaagtggttcagaaattgaaatttggggtttatgacatcgacaacaaaactattgagctgagtgatgatgacttcttaggggaatgtgaatgtacccttggacaaattgtttccagcaagaagctaactcgaccactggtgatgaaaactggcagacctgcaggaaaagggagcattacgatttcagctgaagaaataaaagataatagagtggtcttgtttgaaatggaagccagaaaactggataataaggatctatttggaaagtcagacccatacctggaattccacaagcagacatctgatggaaactggctaatggttcatcggacagaggttgttaaaaacaacttgaatcctgtttggaggcctttcaagatctctcttaactcactgtgttacggagatatggacaaaaccattaaggtggagtgttatgattatgacaatgatgggtcacatgatctcattggaacatttcagaccaccatgacaaaactgaaagaagcctccagaagctcacctgttgaatttgaatgcataaatgagaaaaaaaggcaaaagaaaaaaagctacaagaattcaggtgttatcagtgtgaaacagtgtgagattacagtagaatgcacattccttgactatataatgggaggatgtcagctgaattttactgtgggagtggacttcactggctccaatggtgacccaaggtctccagactcccttcattacatcagccccaatggcgttaatgagtatttgactgctctctggtctgtgggactggtcattcaagattatgatgctgataagatgtttccagcttttggttttggcgctcagatacctcctcagtggcaggtatcacatgaatttccaatgaacttcaacccatccaatccctactgcaatggaatccaaggcattgtagaggcgtatcggtcttgtcttcctcagataaaactctatggaccaactaatttttctccaatcataaatcacgtggccaggtttgctgctgcagccacgcaacagcagacagcttctcaatattttgtgcttttgattattactgatggtgtgatcacagaccttgatgaaaccagacaagctatagttaatgcctccagnctgcctatgtccatcataattgttggagttggaggtgctgacttcagcgccatggagtttctggatggtgatggtggaagtctccgctccccattgggcgaagtggccatcagagatattgtccagtttgtgcctttcagacagttccagaatgctccaaaagaagcacttgctcagtgtgtcttggcagagattccccagcaggtggtgggctacttcaatacatacaaactccttcctcccaagaacccagccacgaaacaacagaagcagtgaccacttcaacagaattcttttgtgttmtgtggagcaatgccatctctcaccccaaatcgtgtatctgtcattctacgtactttttacccycagcatttatgatgtaaatctctttctctatggattatatctgtttaaagcattctttctaggttattttggggggacagtgccaagtccatctttgcccagtcaattcagtgattgatagcaatttacattaattgcagtaaagctctttggattagaaattagtgtggggaaagcttattctgttgttgtttttgtttactttcatatgatgaaaatgctgtgtttaagtgtttgtcaataggaagaatggaaaactgttgggatgatgtggtttgcaggttgctgtgcctgattcacagtgtatgttgtataagccartgtccatacctgattatgagagcttcttaaattatatgatatcaaatttgttcctgtaactctgtatacagtgcttttctgcaaggtaaaaataacctgtctatgcatctgatttttgctacagtttagacactgtggtttacaaaacagcatgcactcaacttgggactttatgaaaagtactgaatgagcaggaaaaggcacatactcagttttttaaatgtacaatcaacaagtaaaaataacctcatgtaagtaagccatttttatttgcctttctagatattttattttattgtggaaaactgtaaacatggtcagatttggctttttttttcattaactgagcaagactttcaggatattgtagatgcacagatggtaggttgtcctgaattctacattattagattactttaattgagatttgttaaaacggttaggactgttttgtccaggaaagataagaggaccaaacatataaggtgaaattcagaattccgtttccttctaactaatgaaaaactgcttactaaaaaaaaattttatactttccttgctaaggtcccatatattgatttgtacagatccacttagtcattttctcctttttttaagaaccattttcatctgatttttaaactcacgataccagttatctgttaatcaaaattgcattttacaatttaataatgtgatatttcctatgtctacagcataccttattaggtataaaacctactgcaacttagaaaaaggaaagaaaaaagaaaacttttccaactgctgcattaagatagggtggattttatgtgctttnttttttaagagttgaatttcttttcctgacttttaccttttacagcgtattacttagtgaacattacattttcagaatagatcctaatattttattgagggcctatgtgctaaaaactatgcatatctatatattggccaattatctttaataatttaccttttgaaattgcatgtttatcatatatccttaagtggacacatacagtgccatgttgatgtgcctctcagttttattgaaaagctgccccacagcccatgtctcttgttctctgcaatgcctcaagggagtgagctctcaaccacagatagctgtggcttctcagaagcagctcattgccaaggccaggctgagaggggacctgcttgctgtggtggttgcctagcccagatgagcatttacctaccaccttcccacttggctagctgtcctttggatatgtgctgttaactggggaaggcatctaactagtagcctgctactccatagtatggctcaatagatgacacatcattttgacattatcaataggagaaaagaaaactaacccttcttctgattgtttggagccatagttgtctcagatgttctaattctctttgtatgcttggaaacagcatagatatgttgctgtggttttcagaattttctcttttaatcacaagaagccttttaaaaaatgacttacacatattctcaatgtacagtaaaacagacagaagtgagcttatctgtttgatgctgtggcagggtcccagtcactgggcatatcctccttctccttaaccagctcctcagcagcccctgagtcacctgcacaaggtgcttgggaactgctggttatgagcattcctggttttcttcagccaaataacaggtaatcactgtcaattggatttggtcttcattattttatattctgattttatcagaattattctattttaaaattgttttaaaatttaaaaacatttaattcatgatcatgttcatcagtagatgctattattcataagaactgtgattccagcaaactagggtaattggtgcctttttacagttttgaataaaagcatttacaatttctaaattatcagttttcacagtttcagcactcaacctcatcatacgctgatttaatattgttttacattaaaatagtccttttccctgttgtgccaccattcatttaagtgctgtttgttcttaaaatgcatttaaagaaaaattacccatattgactttcacacytcatataatcagatctattacaaatatatatcggagtgacggtgcccaggatagatgtaatatttcttacagatgctggcacagaggaaataatataccagctaatctagtcacctaaccttgtggttagaattgcaattttaagaccagaaaaatttgaagtctgatcagagatttacaactgttcattatagtggtgccttaggcaatctttccaaagtaaattcagggccccattgctacttatgccatatttggacatactttttttttcttcaattttgtaaacttcctggaaagctgtcttcactaagtatcccctagtctctatatatgtggttagtagtcatggaaatgacacataaagtacgccagaagtttgatggaacgtgttagaaactgttttgtgcttttatggatgtcatacttgacaatacatgtgtaagttactaatatatgaattgatgctaaatatatcttacatttgaattccttttggataaagttatttcttgatgtgacasagtagtgtgttttcatttttattctttacatgtgaccaaaacaatagaaaagttaaaaataaaatatagtgttttaggtggcaaaaaaaaaaaaaaaaaaaaaa

SEQ ID NO: 122 - DNA, 230 bp, Homo sapiens
agggtctgggggtggcctgggcacatgctgagggttctctcctgaaggacagccacagtgtggaagaccctgtgccccttctggggtgaggagtaccaagtgcacctgccgcccaccttccacgctgtggctttctaygtcatggatgaggatsccctcagccgggacgacgttatcggaaaggtctgccttacaagggacaccatagcytctcaccctaagggtttcag

SEQ ID NO: 123 - DNA, 916 bp, Homo sapiens
  SITE (884): n equals a,t,g, or c
  SITE (905): n equals a,t,g, or c
cgcaatggcacatctgaccccttcgtccgagtgcgctacaagggccggacacggagacctcgatcgtgaagaagtcatgctmcccacgctggratgagacgtttgaatttgagctgcaggagggggccatggaggcgctgtgcgtggaggcctgggactgggaccttgtcagccgaaacgacttcctgggcaaagtggtgattgatgtccagagactgcgggtggtgcagcaggaggagggctggttccggctgcagcccgaccagtccaagagccggcggcatgacgagggcaacctgggctccttgcagctggaggtgcggctgcgggacgagacggtgctgccctccagctactaccagccactggtgcacctgctgtgccacgaggtcaagctgggcatgcagggcccagggcagctgatcccactcatcgaggagacaaccagcaccgagtgtcgccaggacgtggccacgaacctgctcaagctcttcctggggcaggggctggccaaggacttcctggacctgctcttccagctggagctgagtcgcaccagtgagaccaacaccctgttccggagcaactctctggcctcaaagtccrtggagtcttttctgaaggtggccgggatgcagtacctgcacggcgtcctgggccccatcatcaacaaggtgtttgaggagaagaagtacgtggagctggaccccagcaaagtggaagttaaggatgtagggtgctccgggctgcaccgcccgcagaccgaggccgaggtgctggagcagagcgcgcagacgctgcgcgcccacctgggggccctgctgagcgcgctcagccgctcggttcgcgcgtgccccgccgtggtgcgcgscamcttycgccanctcttccggcgcgtgcgcgancgcttccccgg

SEQ ID NO: 124 - DNA, 489 bp, Homo sapiens
  SITE (482): n equals a,t,g, or c
  SITE (488): n equals a,t,g, or c
ttctgaataaaaaggatatagcagttgggataggcttgggttcttgtcctttatgttcttgtcctttcctcatgataatcaaatcataattagaaataagatgctaagaatacaaaggtggctctatgttaatactgtattgataggtcaaaggagaaaaagcatgagatcaattcattagatactgaaaagtcttttgagggaatttaatgtcttcttgctttctttattaacagaataggaataaataatagcataggcataaattaaaaataatgtaattttttaaaatctcaaactaaaaatggggawtcatacttaaacattagcattcccaggagagttgggagccaagacctctggtgcccactatcactcaaccatttccattatttaagtcctagcaagtgccaaaccagaaaagatgcctaaatatttagagaagggaaagttattttttgccaatgggcggaatttttaanccgggna

SEQ ID NO: 125 - DNA, 576 bp, Homo sapiens
  SITE (161): n equals a,t,g, or c
  SITE (473): n equals a,t,g, or c
  SITE (531): n equals a,t,g, or c
aattcggcacgagcccaaaaggaaccgtccaagcttggggtgtatttttggcgctcccaccgcggccgagctcgagcccggagatgaggggaaagaggaggaggaaatggtggctgagaacaggaggcggaaaaccgcgggcgtactgccggttgagcctnaatgacagtgaagtggacatgtttggtgactatgatagctttactgaaaactcctttatagctcaagttgacgacctggaacaaaaatatatgcaactccctgaacataagaaacatgctacagactttgccactgaaaatctttgctcggaaagtatcaaaaacaaactcagcattactaccataggcaaccttactgaattacaaactgwtaagcacacagagaaccagagtggatatgaaggtgtcactattgaacctggagctgatcttttgtatgatgtaccttcctcacaggctatatactttganaatttgcagaactcttcaaatgatttgggtgatcattctatgaaagacagggattggnagtcatcctctcacaacactgtgaatgaggaactgccccataatt

SEQ ID NO: 126 - DNA, 976 bp, Homo sapiens
  SITE (9): n equals a,t,g, or c
  SITE (56): n equals a,t,g, or c
  SITE (65): n equals a,t,g, or c
  SITE (66): n equals a,t,g, or c
aatggaaantgagtaataaatgttttctgatctatgggcaatataatctcatttancaaagacanntgatgggcaaactcaaaagactartttttaaaaattatgtttaatgaatgtraaatgggtaaagaamcaaaataaacatgttaaaaggtgttcttgatatttcactttacatcataattttggcacttcatggaacactgatttcccaaagaccagaattggtataaaagttcagcaggttttttacataccttgtagacatcgtacatgagtactggcaaacattgaaatgtagtgaactaaacattcccatgtatttgcacatgcatgcagtagtcaaacaattatagttatgtatttagcttgcagtgtttgtttcaagcactctcttcagtagatcttgtttcagatttaagtcttacaaattctttagccacatcatcactggtcctctgagagagtattctaagratartcaaaccagtttcatccatagagatatttttcagaagaggataccatgccccatagcttcccttttctgctatgttctgtagctgaatgactgtcattccgataattcgatcttctctggcaaagcagtaatccttaactgagagatgaagttcataagcccctggccgattttcctttccgagaatgaactgaaatgtttcattgtactttggtgaccatgtgttgctttttgtttttgtgccttgttttctcttcttgtctccaaggttgggtcccagtatacaaacttccacaaaggggcggaacattgctgtggtctgccagtktaggtcattmatagcaatcacttttacastgactwtatgatctcccgttcctggggtggcagtgatgtccacatgaacagatatytgacccacggcatctttggaggaacgacatcactgatgtggctcagtcattttgaccaggatattatccaccccgccaagcc

SEQ ID NO: 127 - DNA, 1050 bp, Homo sapiens
ttttttttttttttttaacccaaatagtctattatttattgaagaaactgaatttcatagtttaaaaccttgccattaagaaggtgaactgcaaggacagtgccagtgggaagttctaccaaacgtttcaggaacaccgcctgtccctcctttgaggaaaagcagtcctctgtgtgtgccccttattgatggtattttcattaaaatgcacatacacaaaaaaagaaaaataagcggcccaggttcatgtaaacagtagtgtttattcagaaagcataaaccccagcgctcttggaaggtttttctgagatggaccagaggctccaatcagaggcttcgtgtgtaggaagcaattacagcctaaaggagcaggtgagagccagggaaggatcacgtagggatctgagacttgaaatggcctcaggccagacagcacaaggcagcccggacaagacaccctcaacccacatgcaccaaacccagcctcagcacctagcccaccccgatgggacgggggagcagtggcttgttgctgctcatgacctcctggggaaggagggagctgagatcaaaatgaaataaggaacctggtagtcgcttccgcattcatacaagaaacctcatgtctgagggcaagacaggcagggactgccccctgagagccctgagatcgacatttctgaagccctgccacctgccatccctcgtagggattcaagtccaaatagccagagcctctggcagaggagatgggggaaactgaggtagccctagggtcgtcctctcaagtcaagctgcctggagactgtagcagctacggttgaggctgctcaggaagcacagaccgccccagacagcagctgaagctgaagactccagggccaggccatcgggtcaggcgttcaggaacgcgaaagctgacggctctgagccaggaggctctttggctgctgtcctctgggacgatgtttggggggcgcggggagcatcaggacaggactctcccgcagcagccccagcccccaccaggcggggacaggccaccagctc

SEQ ID NO: 128 - DNA, 1164 bp, Homo sapiens
  SITE (1128): n equals a,t,g, or c
gatcttatcagaagctgagcaaaatttctgtggttcctcctactccacctcctgtcagcgagagccagtgcagccgcagtcctggcasgttacaggaatttggtcagtttagaggatttaataagtccgtggaaaatttgtttctgtctcttgctacccacgtgaaaaagctctccaaatcccagaatgatatgacttctgagaagcatcttctcgccacgggccccaggcagtgtgtgggacagacagagagacggagccagtctgacactgcggtcaacgtcaccaccaggaaggtcagtgcaccagatattctgaaacctctcaatcaagaggatcccaaatgctctactaaccctattttgaagcaacagaatctcccatccagtccggcacccagtaccatattctctggaggttttagacacggaagtttaattagcattgacagcacctgtacagagatgggcaattttgacaatgctaatgtcactggagaaatagaatttgccattcattattgcttcaaaacccattctttagaaatatgcatcaaggcctgtaagaaccttgcctatggagaagaaaagaagaaaaagtgcaatccgtatgtgaagacctacctgttgcccgacagatcctcccagggaaagcgcaagactggagtccaaaggaacaccgtggacccgacctttcaggagaccttgaagtatcaggtggcccctgcccagctggtgacccggcagctgcaggtctcggtgtggcatctgggcacgctggcccggagagtgtttcttggagaagtgatcattcctctggccacgtgggactttgaagacagcacaacacagtccttccgctggcatccgctccgggccaaggsggagaaatacgaagacagcgttcctcagagtaatggagagctcacagtccgggstaagctggttytcccttcamggcccagaaaaytccaagaggctcaagaagggacagatcagccatcayttcatggtcaactttgtttggtagtgctaggagccaagaatttacctgtgcggccagatggcaccttgaactcatttgttaaggggtaggtattcgatgtaatcaaatatttattggtgatcnagtatacatcacaacatggcccagaacctgcagcga

SEQ ID NO: 129 - DNA, 357 bp, Homo sapiens
ggcacgagcagagcagcaagtgctccgtgcagggctgttgctatcacttggaggtgaacagcctcttttgccggtattcagtgaagaaagcaagtctaaatatgcagttctctcactggagtgaaagatgttttgttcatttckaatcaactatgctagacagctgcactatasaagtgcctgcaatttgccatttatttgtaataagaaaataataaacactgctggaaccagtaatgcagaagtccccttggctgatcccggaatgtaccagctggrcattacattaagaaggggtcaaagtttagctgctcgagatcgagkwgggacgagkgatccatatgtgaagtttaaaat

SEQ ID NO: 130 - DNA, 631 bp, Homo sapiens
  SITE (45): n equals a,t,g, or c
  SITE (472): n equals a,t,g, or c
  SITE (480): n equals a,t,g, or c
  SITE (534): n equals a,t,g, or c
  SITE (544): n equals a,t,g, or c
gcaatatccccaggctttccattctgccctctactcctgacaccngtggcctggggcctggttggggccatagcgtatgctggtgtcctgggaactattgagctgaagctagatctagtgcttctaggggctgtggctgcagtgagctcattcctcccttttctgtggaaagcctgggctggctgggggtccaagaggcccctggcaaccctgtttcccatccctgggcccgtcctgttactcctgctgtttcgcttggctgtgttctwctctgatagttttgttgtagctgaggccagggccacccccttcctkktgggctcattcatcctrctcctggttgtccagcttcactgggagggccagctgcttccacctaagctactcacaatgccccgccttggcacttcagccacaacaaaccccccacggcacaatggtgcatatgccctgaggcttggaattggggtgnttttatgnacaaggctagctgggctttttcatcgttgccctgaagagacacctgtttgccantcctctcccnggctgagtcctctggcatccatggtgggtggtcgagccaagaatttgtggtatggaacttgtgtggcagcgctggtagccctgtaac

SEQ ID NO: 131 - DNA, 3943 bp, Homo sapiens
gatttgctattaaacttcaaaatctacaaactgtaagacttgtatttaagattcaaacccagactcccaggaagaaaaccattggagaatgctcaatgtcactcagaacccttagcacacaggaaatggattactctttggatataacaccaccttcaaaaatttctgtttgccatgcagaacttgaattggggacttgttttcaagcagtaaatagcagaattcagttacaaattcttgaggcacggtaccttccaagctcatcaacacctctgactttgagttttttcgtgaaggtgggaatgtttagctcgggagagttgatttataagaaaaagacacgcttactgaaggcctccaatggaagagtcaagtggggagagactatgatttttccactyatacagagtgaaaaagaaattgtttttctcattaagctttacagtcgaagctctgtaagaagaaaacactttgtgggccagatttggataagtgaagacagtaataacattgaagcagtgaaccagtggaaagagacagtaataaatccagaaaaggttgttatcaggtggcacaaattaaatccatcttgaagacttcacacattaatttggtgaagaacttgacattcttttagaagacttatgatttcaatttgctaccaatgagaagaggcaaatcaacaaatttgtcaatttatgggggctataattatggtatataatgtatctgatagaaaatttgataagaaaatgtaatgaattttatcagatatccaaagtaaaggaaatgttttaaaactgcaacaagagacacagacagtaaaatcaaagtattattaggatgactaaataaattataaagtctgtgagaatatcaaccatagatagttctttctatattatgtttttgcttttgtattttaagctttacttagatattcaaaacctggtatatcaagtctctgttagtactattggcatttagaagactttaccattatttcagtgctaggcattattgattaggtcttggctccactgtttacctcttgctatgtattttctcccggtaaaaatgaattgraccatttcaactattttctatatttggagaaagtttgtgccctgtgttttataatttttttacccataagacatcacattatccctttgtaagctacttatctccaaaaaacttcagaaatagaaaactacattttggcaggaataattgaaaacaccagaaggttgaagtttaattggaaacccagaatatacatactttgctgttttcttccctcaaatattttactatttgttttatttggagttaaaataagagtatcatccatatggtccatcctaattcacagaattaaatgagcttaaatagaaaattcagtattttatgataatcacttcgtttttagtttttaaaatttagattattctataatttaccgtgtttgagtattttctcatttttttcataaccatacctgattatactgtgtaacaaatattttctattgcagttttctttccagtacttattagaactcagtatttggaaataatttcagcttaattgaccataagaactgtggccaaaaagaacagttttttggagaggcagatgacattatacctgattttagaaaatctcactttatttttgctaataagtasactaagtgctytgtgttctcagtcttccctttttttctgcccccattcttactttgtcccaggcatgcagagaaagatggtgatattttaggccaggagtataccttgctataacctaagcatgccttctttattccagctcctatgttctgtgtatatcattaacattttcccaaataaacacttaattctcttttccctaggtgccatctcctcaagctacaaaatgtccacatcttatatcccctttgcttctactgctctgattttgtggtaccagtactctctgccactgaacattttgaaatatttttgttttagatttgcaaaaaatgacatataggtcagtactcacatggatttttaagataaatcacctgtgtgataatattttgaatctgagacgaatacaacttttaaaaattgtttttaaaaatagacttttttttttagagcagttgtaggttaacagaaaaattgagaggaagatagagatttcctttctcccctgacaaagccctcaacagcctcccaggctatcagtatcctgcaccacaatggtacatttgttacaatcaatgaacctactctgaaacatcattatcatccaaagttcatggtttacattagagtcccctcttggtgttatacatgctagaggacaaatatatgatgatatgtatgcatcattataatatagtatagtttcgctgccctaaacatcctctgcaaatgcaactattttaatgggtaccaaagaagtaaatgtatttactggcttttagataataaataacgggctttattgtttattttaaaagctacaatttgttttagctggtttctctgttctattaatgctttgaatttccaaatttaatatatgtagtcatgcatttaacttaatatttaattatttgatttatttaattttctatattcttacaatgtatgtatgatgtataatttaagggaaagctatgacttctcagtttcttagaatcctaggtaaataaaacaataaaaagaaaacccttacatttaaaagagctttcaggtacagaagtattgatacaactaagatcctaaatgttttaattagtgtttacttaagcctttttcaggtgaggaggtactaatgctggttatttccttgaagctttatgtggacctataaataaaaatccaatctcctgctaataggtatgcatattgtgagaaaaacgttaggagctggtagtaaaaaatgagattctatgccaaaataacttctcttcatatttgcctaggcatttcttgacctttacccacttacgcaaggagaaggaaatcataatgatgtcatgtgatcaaaggaaaccatggaagggttcacgctgatagctgatagcttttacagtgctcattcctaacagtggatttacttgtaagctttcagatcaacacaaatagctgcagcctgggttaaaatataacatcactatttggcttttgttttgcatgatttttaaaagcagtactcctagggaaatggcctctgaagtatatcagtttcatctcttaccaagactgttaagaagaaactagtgggattttgaacaagttatataattgtggtctgaaaagaccctaaactgaagttctgtttaaatatagttacatgaatttctctgatactaatgtactcaacagccaggtataaactatatctcctagtaacattttccatttttgtttaatcaaatacttgcttatgaaggatttcagaaatttgtaataaatgtcagcttttgatagcatagcagtaattgacatttcaaaaatatatatttctttctgtgtttggttgggtgtaatgaggaaaatacctgataaaatgtctgaagacactttctaatgttatcttggtgcataagctgtaatttttattcaaaattaaatttcaaatgtttgcagttttggctaaaacattgagttraaagaattatgaaaagtgggcccatatgaagtaccatgttcattttgaaatatagatttaagatttagaaatatattaaaagagttaatggagcctcctaaattggattttattttgtgggtgaagaattgtaggaagatgaatgtggcctacagttttagtaatctcctagtggagttttttttaacttagtacttttttatttttaagttttttaatctataaaaaatgtgatttctataaaccatgattacaataaataattatattaaaa

SEQ ID NO: 132 - DNA, 713 bp, Homo sapiens
  SITE (208): n equals a,t,g, or c
cccacgcgtccggtagtgtgtggatgaacacaatgtaatctttactggcctctttcttatagttcagactccatgtttgaacagctttggtgtttttagtttttattcatttctttttttaaaaaaatgaattatgggtgattcagggtttaatgttgtatcctaattgtgaaatctgtgcttttggacctgagcagatacctttganaccattacctcatctgttactaggaagaatgagctagcatttacattcctcccccctggcaagtctgaaaagaaatactttcccccctttttggaatgaagagactatctataattttatttgtacctttatccacaatacactgttttttccatttgatcctcttatcaaccttgtaggatcattattattattcttactttgcagttgaggaaacagacttgttggcaagtgacatagccaagacttgaaagttttttaaaattcaaagcccacattcattatcatagctactttatatctttccactgggataacaggacatgcctaattggctttttaaattaataaatatcagtttatattgctgggtcatcccccccccatagtgtttttaaataattttaaaactatcagccgattaaaaattattttaaataaatgtgatatgtgtgtgtgccctttcttcccccccaaaacccttttttccccccccccccccccc

SEQ ID NO: 133 - DNA, 528 bp, Homo sapiens
aactagtgttttttccggcctgcaggaattcggcacgagcctgggcggagtgcggggccgacatctgcggagggttaggaggggaaaggttttttctacccgccggctcggcgaccaggctgaaactcatgtttgaatttagtgagccgtttgttcgttagtccggaacactagcgcggtaggccaagctgcgaggaggcggcgaaatcagcgaatagcaaattataaaagaaacaaggctttatctcctaggccctctaaagcatccccaggagatccgtatccccgttttggagagaacgctgaagctcagaaaaactcagtggaaagcggcagacccaagcctcctcgccaagtctgagtgaccgtgaagccctggtttttccttctttttctttctttktgtactttttttttttttggtagagtcgggctgttgcccggcctggtctcaaactcctctaactcaaactaaaaagccatcctccggcctcgtcctgccaaagtgctgagatcacaggcataacc

SEQ ID NO: 134 - DNA, 1399 bp, Homo sapiens
gcacgagggaaattccagatatggatgtattgggaagccccgctagcattcgctctgccgggcatctctagcagtgagagatgagtgcttagtgacgccgagcagatctcaggtggacacagattcagtttgaactccttgggtaccacatggtgagaaaggttttctctctccaattctctttcaaccagagagaaattctcaaaatggcactaacgcatctttaactcataacacttgctagtgtttatttccaccgaacagcgggaacaaccttcacacaaagagccttggcagaaaacagtgtctagttataatttaatcttgttttgttttcatgatatttatcttcacagttgtctcctccttatgaggctgaccacttactcaagtggtataaagcaactttttcaagtttattgacttaaggagaagctgtacgtccatttgaagaatgggaggtgtgggggttctggcggtgcatagatgcagcaagaacacctgttggggttcagtccgtctgtgaaaaaaatatggggggcagtgttttttggccaccacattatcaaaaataaaaagtttgggtcaggtgcggggctcacacctgtaattccagcactttgggaggccgaggcaggaggatcacaaggtcaggagttcaagaccagcctggccaacatggtgaaaccccatctctactaataatacaaaaattagccgagcatggtggtgggcgcctgtagtcccagctactcgggaggctgaggcaggagaatcgcttgaacccgggaggcggaggttgcaatgagctgagatctcaccactgcactccagcctgggcaacagagcgagactccgtctctaaataaataaataaaaagttagataatatcccatgctgctgaaggtgtggggaaacaagcatccccacaggctgtatatgaagatgcaaatttgttaaacatctgtccagatttaaaaggcagataccctttgacccagccatttcccttttaggaacttaacagataggaatttgcaaaaataaaaaagcaatgactggataaggatttccattatagcgctgtttataataacatcaaaacaaaataaaacaaaactgggctgggcgtgatggctcatgcctgtaatcccagcactttgggaggccaaggcgggcggatcacgtggtcaagagatcgagaccctcctggccaacatggtgaaaccccctctctactaaaaatacaaaaattagctgggtgtggtggtgcgtgtagtcccagctacttgggaggctgaggcaggagaatcgcctgaatccaggaggtggaggttgcaattagcccagatcgtgccactgcactccagcctgtctcaaaaaaagaaaaaaaaaaaa

SEQ ID NO: 135 - DNA, 931 bp, Homo sapiens
ttttttttttttttttttttttttttttttttccaggaaaggcattttcattttatttaaaaattatttacaatttattaagccttcataaatgctttattttaaaatcttttttttaaactttttttttaacctgaagaaaatctttgtggggtgggggtatatagggaggggagtggtgacaggctccatagggattttgcaaagggatgggtgtaatgcaacagcagtggcttgagcctggtggcctcaggtgatgaagaccagccaggcaggcaccccggggccagtggtcagctgggcaagaagcctgcatgatggtagttcttgttcaaaactcaccatttattggtttgggtctaagtacccaacattgagggctgacacttcgcctgttcctaccaggcaagagcaggtgttgggactggatgactgtgaagttatctacgagaagtcatgcactgctgagcctcaggccaggccaggcaaggggtgtggtgaagtcaataatcattgctggaaaaggcatctctagctccaaagtctttacttccacacgctgtggccctcctgtctgcaacacctgctctgggttgttggggaagaggggacaaagttatgtgggggtgttggttgtacaatactctagggtgtgccgagaatttctgaggacttccacttcttggtgggtgccagccttccccatcaattgatggacatttgaaaagaccacttatgattaaaaacctgtctcgaactgcccagtatccacttcactctgcattgcagaaacgctgggctgaaagttccactatttaaaatagtagtgtttttttttgtttgtctgtttgttttaactctttgtaggtctgagacctttgagaaccttatgaaagctttaatgctctggaaaaaacatacaagaataaac

SEQ ID NO: 136 - DNA, 481 bp, Homo sapiens
  SITE (467): n equals a,t,g, or c
  SITE (471): n equals a,t,g, or c
ggagatactgctgggtgcgtacgaggcggacagcgaagtgtcccttggatttggtaacgtggaggttgttggcaactttgacaagaggactcccagcaaagtgggttgaagatgggaggtgagaaagagatagtgatggtggacaaatggtctttttgagaagtttcactgagaatgggatggggacgtgctgaaaccgtgggttcaggggagagtttttaaagatgagagagcatgcctgagtgcttgtgggaggcgtggcagatgcctgggagcaaagtcctcgagaagaggcctccttgaggacaggagtcatttgcaattggaatgatgatggagaatgggggtgcagaagcttctgggtttgtgacttggcagtggtgggtgaaggcgttcctggaagggttattagatccagagaagggaggagagctgtgtgggtgagaactgggaaaggaagatttacngacngagaatctga

SEQ ID NO: 137 - DNA, 830 bp, Homo sapiens
  SITE (666): n equals a,t,g, or c
  SITE (668): n equals a,t,g, or c
  SITE (684): n equals a,t,g, or c
  SITE (726): n equals a,t,g, or c
  SITE (759): n equals a,t,g, or c
  SITE (812): n equals a,t,g, or c
  SITE (825): n equals a,t,g, or c
ccctgcccaaaaaggggcggcgcaagtctcagcccaccgtgccagacgccggaatggcagcagaaaatgtcctgaccccctcacctccactcagagcccacctgctcccgcccatctcttagaaactgcaggagcagccacggccgggccgccggggatcctggcggactaagggctgggtcagagccgcgcaaacatgggctcgctcgtagtcctggcgagcagcactcccaggcaagtcgcccgagggccttgcagggcacccagaaaatgtcactgccggcgaagtgaccccgagccgggccacgggacccctcacacctcaccctttctcctgccgaccctcgagatgacagcggactggaaggcattacctgagcagcagcccgctgggccgtccgaggccggtggttccgaagggtggccacggccactagcctgccgtagaacatggaggccgccatttctgagtcggaccccgtcccctcggcgccgcgcgcaggcgcacaggcgacaggcggcccaaggcgcagcctctctgcagcgctcacctacgccccggctcgcgccacccgttgggggcggggcctcgggttaacactgcagccgctagaccagctcctggcgggcgcggagcaagctttgacctttggaactgggcaccgnancccaatatctgcctgnggtcagaagcaacctggacactttctaagggaattgcaatgnaaagggggaccaagggccggcacttgggggganctttaacttcttttaaacctcaagttggcttaatctggaaaaagggggttcanttcaagaaatggnttacc

SEQ ID NO: 138 - DNA, 185 bp, Homo sapiens
  SITE (183): n equals a,t,g, or c
ttccaagaacagcagcagcagcggcatcacacatgcaaattactggactctgccccagatccacagaattggagactggggatggggcttagcattctgttttaacaagtcctccagatgattctgttgtgtatctagcttgagaatcactgccctggagaatggaaaaaaaaaaaaaaaaanct

SEQ ID NO: 139 - DNA, 465 bp, Homo sapiens
  SITE (418): n equals a,t,g, or c
gacaagacgctacttcccctatcatagaagagcttatcacctttcatgatcacgccctcataatcattttccttatctgcttcctagtcctgtatgcccttttcctaacactcacaacaaaactaactaatactaacatctcagacgctcaggaaatagaaaccgtctgaactatcctgcccgccatcatcctagtcctcatcgscctcccatccctacgcatcctttacataacagacgaggtcaacgatccctcccttaccatcaaatcaattggccaccaatggtactgaacctacgagtacaccgactacggcggactaatcttcaactcctacatacttcccccattattcctagaaccaggcgacctgcgactccttgacgttgacaatcgagtagtaatcccgattgaagnccccattcgtataataattacatcacaagacgtttgcactcatgagt

SEQ ID NO: 140 - DNA, 2733 bp, Homo sapiens
  SITE (2255): n equals a,t,g, or c
gcaggaacttcttcagtgttacttgaaggatttcattctcttgaccatgcgtgtgtcaacggaggaggaattaaagtttctgcagatggctctgtggtcctgcactaggaaactgaaagcggcgtcagaagcgcccgaggaagaggtttccttaccgtgggtgcaccttgcctaccagcgtttcagaagccgtctgcagaacttttccagaatcctgaccatctaccctcaggttctccacagcctgatggaagcccgttggaaccatgagctggctggatgtgagatgaccctggacgcatttsccgcaatggcctgcacggagatgctgacaagaaacaccctgaagcccagtccccaggcgtggctacagttggtgaagaatctttccatgccgctggagctcatctgctccgatgagcacatgcaaggcagcgggagcctggcccaggctgtcatcagggaagtcagagcccagtggagtcggattttctccaccgcactcttcgtggagcacgtgctcctaggaaccgagagccgcgtccccgagttacaggggctggtgaccgagcacgtcttcttactagacaagtgtcttcgagagaactctgacgtgaagacgcacgggccttttgaggccgtgatgcgcactctctgtgaatgcaaggagacagccagcaagaccctcagcaggtttgggattcagccgtgctccatctgcctgggagatgcaaaggaccccgtctgtctgccctgcgaccacgtgcactgcctgcgctgcctcagggcctggtttgcctcagagcagatgatatgcccctactgtttaactgccttgccagacgaattctctccagctgtttcccaagcgcacagggaagccattgaaaagcatgcccgcttccggcagatgtgcaacagtttcttcgtagacctggtgtccaccatttgcttcaaggacaacgctccgcctgagaaggaagtgattgagagcctgctctctctcctcttcgtccaaaaggggcgcttaagagatgctgcccagagacactgtgaacacacaaaatctctctctccattcaatgatgttgtggataagactcctgtcatccgctcagtgatactgaaactgcttttgaagtacagctttcatgatgtaaaagattatattcaggaatatttgaccctgttaaaaaagaaagcattcataactgaagataaaactgaactgtacatgctcttcatcaactgcctggaggattcaatacttgagaagaccagtgcttactccagaaatgatgaactgaaccacctagaagaggaaggtcgtttccttaaggcatattctccagcaagccggggccgagagcctgccaacgaggcctcggttgaatacctgcaagaggtggcccggatccgcctctgcctcgacagagctgcagatttcctctcggagcctgagggaggcccagagatggccaaggagaagcagtgctacctgcagcaagtcaagcagttctgtatccgggtggagaacgactggcaccgggtgtacctggtgcggaagctcagcagccagcgggggatggagttcgtgcagggcctctccaagcccggccgcccgcaccagtgggtgtttcccaaggacgttgtcaagcagcaggggctgcggcaggaccacccaggccagatggataggtacctggtgtacggcgatgaatacaaggctctccgtgatgctgtggccaaagctgtcctcgagtgcaagccactgggcattaagactgctctgaaggcctgcaagaccccccaaagccagcagtcagcctacttcctgttaacactgtttagagaggtggctattttgtacagatcccacaatgcaagcctccaccccacgccagagcaatgtgaagctgtgagcaaattcattggcgaatgcaagatcctttcacctcctgatatcagccgttttgcaacatcgctcgtggacaattctgtgccattgttgagggcggggcctagtgacagcaaccttgatggaacggtgacagaaatggccattcatgctgcagccgtccttctgtgtggacagaatgaactcttggagcccctamagaatctggccttctccccagccaccatggcgcatgcttttcttccaaccatgcctgaagacttgctggctcaagctcggaggtggaagggtctggagcgagtccactggtacagtaagtgttggggtctagatgacnccacactcctttgagcttcaaagggtgtccagatgctatgaagcattgggttcgacttggggtccacgtggtttgtgcctcagggtccaaaaccacctgcattctaccggtggcgtctgcagaagacgaatggcttgaaggagctggcactccgccggctagatgatccaaaccatttcatttctttgtcgtgtggaaaaggccctctgtgatgcacttctgttctctggaatatgccattttgggagaagggagggactgggaaccacatcagagacgcattcaaaggcccaccacaaaacaaagtttttgacacaaagctcttctgaaatatatgaaatatagaaccgggagactgactcatataacccatgacatgtaaattttgctgttgcctgagtaaatattttaaaactagtttttaaagttgttataaaatatgctcatgmcaaaaaaaaaaaaaaaaaaaaaaaaaaaa

SEQ ID NO: 141 - DNA, 1918 bp, Homo sapiens
ttctttttaaaatgttaatgcccgttgtctttcctgggctgtttgctagcggaaggatgccagggaagccagcaggagctaggagagagtccgtggatctcgaaagaaatatgggagacagatgcccggcggtgcgtctggagatggggacggcgggagttgagttgtggcagtagtygagttgtaatttgtgggcggaggccagagagactccccacccttcacccctgccccactctgtccccagttccgccatttgtgaggccagaggtttccggactgttggcctcgccaggcagccgtctcccgccccaggcggcatcccccagtccctcccgcctccacgagagcctggagctctcagcctcgcccggggctccactctctcctccggctccctgggctgttttgctctaacgatcttgccagatccctccctctgtagacaaccaccaacctctgtttgctgttgaattctctcctcacattacccaggtctgctcaagacatgattttggttttggtttctgagggttctagtgggcagaaggttggagggacacttatgagggtggccgggggtctgacgctgcactttggaaaaactcacacagttgaatttccaaagaaatctgccctttgccctctttgcacctttgatacattctggaagttttctcaggctttggacacttctggggatggaggtgtggagaagtggggagttccctctcttcatagtaaataactctgaaatatgtgaatgtgaatggcaggagaatctggccaaggatggggccgaaaagggtggttctaattgtttgcttctgatgttgagtctttagctgaccccacaggcaggtttccaaggtgcaaagagatctttcccgagtcagcggccccatcctcatcctccctccctttacttcctcactgtgcagtctccctcaaggatctactgtgaaaggtgtgtttgtagtgatatccaacctaactcagtaacgaagtcgttacttagctcttagctgtgaaataactctggaaacttccccaccccaaccataaattcttacttataaagaaacaggtccccaaactggaaacagcttagtccaggcctcagcgagaaggaaggacaccatgactgctccatgctgggcacagccgggcagtcttgccaagtgcctgctggaggctgtgccggcaagaggcctgcagcaaggagattcccttccctcgggccattatcaatactgtctttatctggaggtggggaagcgcagccctctgagacagcaggacaatggtcagttcagagagggtgagggcagcaaacgcttcagaggacacagaagccagaggacccccccccgccccacagctgggtcagcctggaaaatccatctattagggactttttggcagccagatggcagcaatagcccattaggtctcatcccgagttccaagtcttggctgcaaatgagcctcagttcgccttactggagagcacccccagattcctgggcacagttcatttccagccctttctagatctgatcttttagggggaaagacagcttaaaatgttcttttcattttaaagaaaattattctgtctgcttaagttggaggctacttactctttcacctgacattttctttccttttattcttccagatcaggaatgaaatttccatgctgctcataaagataatattattgtactaattatttttattaccattgtaattatgatcattatgttgatattttagtcagggttttaaatgcacatttattccaagtatctttgtgttttctctttaatatttaaacttattctctctgtgagtatataagtagactggagggacatccagatgtccagttttgtcaggcaaaaaaaaaaaggaa

SEQ ID NO: 142 - DNA, 1265 bp, Homo sapiens
tcgacccacgcgtccgctcgctaagcaagggaacgctcttaaagctttcagtttggttactctaattttattatttctctaacctctctaatcagcagagtgattgaggctctgattgtgagtcctgtttttatttttcacactatttttatactttgaagctgtggttttaaaatatacactcaaaaatgttggctcggcacccacgaggcccaggaggttgtccagatgcactgggtctggggctgctcccagcagcctttcagtgcccccgcccccaccgctggcctttggggatagatggaatgggcaggagttgctgtaagagactggtccaaccacaggcaagcttctggccaaatattttaaattcgactctgagaaactagcaggaatcttgttctggtggcttcccaagcacacactcagggatcagaacctgcagaagcagaattcccagtttcagataaaatgttcattcatctccaatatgcagtgctggtccccatcgcccttccatccatgctgaaagtgtgtgcagcacggtacttagggaaaaacagtgccagcaaagtgggttcatttgtttctgtcaccaccatttgctggaaatggttgtcatgttcacggtactgtagaactcagagatgggtgcaagaaatcttccaaagcgctgaccttcctgtgttcttctccagctagttctaaccctgccctctatcctcttgccctcttttttcccccaggctcctcccttcccttcttttctcccaatccagagtagatctaggaatctgaaatttccaccttggctacaaacagcactgagtctctttgaacagccttgtccataaatcttagattgtttttcatctttgaaaaagttacttctggcccagcacggtggctcatgcctgtaatcccagcactttgggaggcagaggtgggcggatcacctgaggtcaggagttcgagaccagcttgaccaacatggagaaaccccgtctctactaaaaatacaaaattagccaggcgtggtagtgcatgcctgtaatcccagctactcgggaggctgaggcaggagaatcacttgaacccgagaggcggaggtttcggtgaactgagatggcgccattgccctttagcccgggcaacaagagcaaaaccccgtttccaaaaaaaaaaaaaaaaaaaaaaaaaaaaaaaaaaaaaaaaaaaaaaaaaaaaaaaaaaaaaaaaaaaaaaaaaaaaaaaaaaaaaaaaaa

SEQ ID NO: 143 - DNA, 556 bp, Homo sapiens
  SITE (121): n equals a,t,g, or c
  SITE (500): n equals a,t,g, or c
  SITE (533): n equals a,t,g, or c
agccaccacgcccggccaagaactttacttttattaaggtactgctcacatgatagaggctgatgtccttcttccaagtgatggatcagaacacagccagccaattatggcccatcccccngaaacaaacagtgataatactctacaggagtggctgactgaagttatgaaaagcaataaaggcatcaagctggatttcaaaagtctggcagttgtagaaccatccatgatgctcttggaaaatgtgaagaggcatctraagcgtcctgtatggattaatgccgatattcttcctggtccaaatggaaatagcaaagtaatagatgcaaaaccatttttagacaccgtgwayatccttctttccagacgtgacgttttccctgggttggacaacaggatggcatyctgaggaaagtcaatgaagggtacagttggacaatggtgaaagagatggaatatatatgtaatgaactaagtccagcctgtaacgtttccctgtncagagcagcatttagttcaggcagtcttgttcntcagtttactttgggttgtttaa

SEQ ID NO: 144 - DNA, 1647 bp, Homo sapiens
  SITE (1612): n equals a,t,g, or c
ggcagagaataaaggccaagccccagtacaagcccccagatgataagatggttcatgagaccagctacagtgstcagttcaaaggagaggccagcaagccaacaacagctgacaataaggtcattgatcgcagaagaatacgcagcctctacagcgaacccttcaaggaacccccaaaggtggaaaaacctagtgttcagagttccaaaccaaaaaagacctcagcgagccataagcccacgaggaaggccaaagacaagcaggcggtgtcaggccaggctgccaagaaaaagagcgcggagggcccgagtaccaccaagccagacgacaaggagcaaagcaaagagatgaacaataaactggctgaggcgaaagasagcctggctcaacccgtcagtgattcaagtaagactcaaggtcctgtagccacagagccagacaaggatcaaggttctgtggtcccaggccttctgaaaggtcaaggtcctatggtgcaagagcctctgaagaagcaaggttctgtggtcccagggcctccaaaggatctaggtcccatgatcccattaccagtcaaggatcaagatcacacggtccctgagcctttaaagaatgaaagccctgttatctcagcaccagtcaaggaccaaggtccctcggtcccagttcctccaaagawtcaaagtcctatggttccagcaaaagttaaggatcaaggctctgtggtaccagagtctctaaaggatcaaggtcctaggattcctgagcctgtgaagaatcaagctcctatggtcccagcacctgtcaaggaygaaggtcccatggtctcagcayctgtcaaggatcaaggtcccatrgtcycagcacctgtcaaggrtsaaggtcccatagtcccagcacctgtcaaggrtgaaggtcccatrgtcycagcacctrtcaaggatsaagrtcccatggtcccagagcatccgaagatgaagagtgccatggccacagcacccataaagaatcaaggttccatggtctctgagcctgtaaagaatcaaggtttagtggtctcagggccagtcaaggatcaagatgttgtagtcccagagcatgcaaaggttcacgattctgccagttgtggcacctgtaaagaatcaaggtcctgtggtccccgagtccgtgaagaatcaagaccccattctcccagtactagttaaggatcaaggccccacagtcctacagcctccaaagaatcaaggtcgtatagtccctgaacctctgaagaatcaagttcctatagtcccagtgcctctgaaggatcaagatcctctggtgccagtaccagcaaaggaccaaggtcctgcagtccctgaacctctgaagactcaaggtcccagggaccctcagctacctactgtctcacctctaccccgagtcatgatcccaactgccccccatacggaatacattgagagctccccttgacactcaccccttgacacaccaatgaaggagctgacagtgagagtgctcccctcccaggggcagtgaagacacatatttaatctgcatgaaacatgtacagtagtcttgctggaatctaataaaaatggtccctctggctcancaaaaaaaaaaaaaaaaaaaaaaaaaaaaaaaaaa

SEQ ID NO: 145 - DNA, 660 bp, Homo sapiens
ggcacgagctcgtgccgctcgtgccgctcgtgccgctgaggccccacattttcattttgtgctgagacttgtaaattaggtagctggtcctggctgtagcagatggtatagattctttttctggctctgtttttgtgacatctcaacttactgggctcttattaaaggtgatttaggtgacttatcaacttttcatgagtacagatgaagaactcttctagggcaggggtccccaacccttgggccacagaccagtactggcctattaggagccaggccgcacagcaggaggtgagtggcaggcaagcaaatcaagcttcatctgtatttacagccactccccatcactagcattattgcctgagcttggcctcctgtcagatcagtggcgaccttgattgtcataggagcgtgaaccctctagtgaactgcgcatggcagagatctaggttgcactctccttgtgagaatctaatgcttgatgatctgtcactgtctcccatcactccgagatgggatcgcctagttgcaagaaaacaagttcaaggctctcactgattttgccttatggtgagttgtataattatttcattatatattacaaagtaataataatagaaataaagtgcacaataaatgtaaaaaaaaaaaaaaaaaaaa

SEQ ID NO: 146 - DNA, 348 bp, Homo sapiens
  SITE (279): n equals a,t,g, or c
caagacgctacttcccctatcatagaagagcttatcacctttcatgatcacgccctcataatcattttccttatctgcttcctagtcctgtatgcccttttcctaacactcacaacaaaactaactaatactaacatctcagacgctcaggaaatagaaaccgtctgaactatcctgcccgccatcatcctagtcctcatcgccctcccatccctacgcatcctttacataacagacgaggtcaacgatccctcccttaccatcaatcaattgggccancaatggtaatgaacctacgagtacaccgactaaggcggactaatcttcaactctacatatttcccccat

SEQ ID NO: 147 - DNA, 618 bp, Homo sapiens
  SITE (350): n equals a,t,g, or c
  SITE (569): n equals a,t,g, or c
ggcacagctgaaggtgcacctgcagtcctcgccgataagaggcagcagttcggaagccggttcctgagagatccggcgcgcgtcttccaccacaatgcctggtaatcactctgccccttcgcccggcctgtcgctgaccctctgtcccgccgcctcggagcactccgaaaagcccctgaccgccggccacgagtcaagctgccctacccgaggcactctccaaggggagagaaactcctaggccagcgactcaccctgcccgcagccaggacgtgaggcccctaagctgcccgtttgattttctcagggacaatgtggagtggtcggaagagcaagccgcggcggcggangagaaaagtccaggagaacagtatccagcgggtgttgccaggagaaacaagttgattatgagatcaatgcccacaaatactggaatgacttctacaaaatccacgaaaatgggtttttcaaggatagacattggctttttaccgaattccctgagctggcacctagccaaaaatcaaaatcatttgaaggactggttcttggagaccaagagtgaagtnctgaatgtagaaacaatgaggatggacctggtttaatatggaagaccgt

SEQ ID NO: 148 - DNA, 358 bp, Homo sapiens
  SITE (256): n equals a,t,g, or c
  SITE (304): n equals a,t,g, or c
  SITE (329): n equals a,t,g, or c
gcggaacagatcggaacaatcggaatgacgttgtggatcagaccgtgttcttcgatgttctgttcagcaaccgccagcgcgtctggagagatatccaccgcgtcgacttctgcatccgggaaggcataagcacaggcaatggcgatgcagccgctaccagtacacatatctaaaatatgctgcggttgcttgctgataagtccggcaaatttattgttgatcagttcaccaatcggcgagcgcggcaccagcacgnstttcatcgacgtaaaatycatggccgcagaaccacgctttgttggtncaggtwaagccaccggaatgcgttncattgamgcggcggatcagstttcaacaa

SEQ ID NO: 149 - DNA, 860 bp, Homo sapiens
  SITE (472): n equals a,t,g, or c
  SITE (708): n equals a,t,g, or c
  SITE (844): n equals a,t,g, or c
acctggagccctccggaaaccctctgccggccacccccactacttctgcacccagtgcacctccagccagctcccagggccccgacactgcacccagaccttcacccccgcagaggaagccagaggcccccaggagtcaccacagaaaatgtcagaggaggtcagggcggagcacaggaggaggaagaggagaaggaggggaaggaggagaaggaggagggggagatggtggaacagggagragaggaggcaggagaggaggaagaagaggagcaggaccagaaggaagtggaagcggaactctgtcgccccttgttggtgtgtcccctggaggggcctgagggcgtacggggcagggaatgctttctcagggtcacttctgcccacctgtttgaggtggaactccaagcagctcgcaccttggagcgactggagctccagagtctggaggcagctgagatagagccggagncccaggcccagaggtcgcccaggcccacgggctcagatctgctccctggagcccccatcctcagtctgcgcttctcctacatctgccctgaccggcagttgcgtcgctatttggtgctggagcctgatgcccacgcartgtccaggagctgcttgccgtgttgaccccagtcaccaatgtggctcgggaacagcttggggaggccagggacctcctgctgggtagattccagtgtntacgctgtggccatgagttcaagccagaggagcccaggatgggattagacagtgaggaaggctggaggcctctgttccaaaagacagaccagtcagcactatctttgaagaagacattgaagaagaaataaatatncttgataacaaaaaaa

SEQ ID NO: 150 - DNA, 287 bp, Homo sapiens
  SITE (42): n equals a,t,g, or c
cctggtcagctgggttagagagatcgctacatgccagcctgnctgagtcttttctgtctcccagccgttaaaggttttaggaccaggcaggcaccccgtgcaggatttggctctctacttccgytcgccccagcccttcatcccttctaagtcaatgtcagactttggggccagaaagtctggamaagccctaagcctggctgcccaagtggcgtcttagtagtgagttctccggtttgggtggtatttcaagcaaaggctggaattcggcggtggtgggagttaca

SEQ ID NO: 151 - DNA, 493 bp, Homo sapiens
  SITE (119): n equals a,t,g, or c
aatgaaaccactcctagaagatcccctgggtttagcagaccagctggaccaattcctaggacccagcttttacacttgggctgaaatgaatgtctatcatgaatatcctgttcacgggngtaagaaaggggaatgaattaggagagtggccatgaccagtggggagaagcaacaccctcctggggcagtgaggacttgccagccaaacaaaaatttccaaatgttgatcccgaatgggwtaataatgatcccagggactgggcccaaatgcaggacctcaggaaactagtaattcaagggatcaaagagtacactcctaggacacaaaatgtctcaaaggcatttgagattcaacaagaaaaagagaaaactcccttcacattcctgcagaggctcagagatgagaaaatactccagattagatccggaggacccagtagggcaaggcctgttgcagattaactttgttactaaaagctggcttgacattaca

SEQ ID NO: 152 - DNA, 711 bp, Homo sapiens
  SITE (529): n equals a,t,g, or c
  SITE (657): n equals a,t,g, or c
  SITE (677): n equals a,t,g, or c
  SITE (683): n equals a,t,g, or c
  SITE (690): n equals a,t,g, or c
  SITE (704): n equals a,t,g, or c
gggagtttccaacagggaacttgacccgttagcagccgcagccatggcggcgcgttcgcctccctcaccgcacccttcgcccccagcgcgacagttgggccccaggtccccacgtgttgggcggggagctgaagtacacgcaatgcgcagcgaggcctcgggttttgccggcgcagcgcgggaggtggtcgcggacgaaagtgataaaatctgggtgggtgaagaagggtcagggggccggcgagggcctgggggggcagctccggctcatgctcccctcctcagcgcgcccatggggtccagacggctagagggcatctcggtagaggaggcgatggtgacccggacgcagctgctggaggaagagctgagcagcctaaaggaggagttggccctgtgtcaggctgataaagaatttgtatggtctttgtggaaacgtctccaggttacaaacccagatctcacacaagtggtcagtttggttgtggaaagagaaaaacagaaatctgaagctaaagacagaaaaagntctagaaaattcttgcaagtcaaggatgcccaaatacaagaaatttgaacagagagagttcagtacttgaaacaggaaataaatgacccttgtaaaacggaaaaattgcagtagatgaagaaaatgcnttcttaaggaaaagaattcngggganttggaanaagaaaattttaangataaaa

SEQ ID NO: 153 - DNA, 657 bp, Homo sapiens
ggatgccagaattagcagacaaaaacattaaaacagttataactgtttaagatgcttaacaagttgagatatggaaggtataaaaaaggcccaagtcaaacttctagagatgaaaaccacagtgtctgatggaattaacaaaggatgaaattagcagatgattaaatactgagtgagctttggatggaattaacaaaggaattaacaaaggatgttaattaacatgtgtctgatggaattatcaaaggatgaaattagcagatgattaaatattgcaaaaaacgtatatttgaatttgagggcatagaggtggaaaatattcaaaatgaaacatggaaagaaaaagtaattttttataagtgaagagtatcattaagctgtaggacaatttcaagtggcctaatatggatataattggtgtccttgaagggacaacagaagaaaaagggacaaaaatgagaaaaaaaaaaaagagagagaatgaagagacaaagagaaaaaagggaaacgaaagagaaaagggagacaaactgaaaaggggagatggctgaaaattgtccatacttgatgataactattaatatgggcccacagatccaaagtgctcaacaaaccctgagcacaaaaaacaacaacaacaacaaaaaaaaaaaaaaa

SEQ ID NO: 154 - DNA, 1314 bp, Homo sapiens
ggcacgagcttatttcacattctgataccatacaagcaattctgcgctgtcaggatgttagtgctgggtctttgcaggaattggctctgctgacaggaattataagtaaagcagcacttcctggaatattaagtgaacttgacgttgatgtaaatgaagggtctctaatggagctacagggacatattggaagattccagcgccagtgcttaggactactaagtcgctttggtggctctgacagactgcgtcagtttaaatttcaagacgataatgtggagggagataaagtaagcaagaaagatgagattgaactggctatgcagcagatttgtgccaatgtaatggaatattgccagtcactcatgttacagagttcccctaccttccagcatgctgtgtgtctcttcactcctagcctttcagaaacagttaatagagatggaccgcggcaagatacccaagctccagtggttccatactggcgcctgcctggtttaggcattatcatctacctgctgaaacagagtgctaatgatttcttcagctattatgacagtcatcgacagagtgtcagcaagctacaaaatgtagagcagcttcccccagatgagataaaagagttgtgtcagtctgtgatgcctgctggtgttgataaaatctccactgctcagaaatatgttctagcaagacggcgcttggtgaaggtgatcaacaatcgagctaaactgctttccctttgttcttttatcatagagacctgcctatttattctttggcgccatctggagtactacttgttacattgcatgcccacggattctcaagattccttatttgcctcgagaaccttgtttaaaagcagaagactgcaagattccttcgcctcagaaaccaatctagattttagaagtgggctggctatagtgagccaacatgatttagaccagcttcaggctgatgcaatcaacgcttttggagaatcactacaaaagaaacttctggacattgaaggattatattcaaaagttcgatctcgatatagtttcatacaggctcttgtcagacgtatccgtggcctcttgaggatatcaaggaactgagagcctgtgcttatgctcttctatgagagagatgaattggggagaattgtctccattttatagattagtttctttctaaattatgaccaaaaatattttgctatttctttctttgtatatggacatcttttctgtaaacttcttcccctagttccatcctcactagtaaaaaataaatactttttaaaaaaacaaaaaaaaaaaaaaaaaa

SEQ ID NO: 155 - DNA, 402 bp, Homo sapiens
  SITE (78): n equals a,t,g, or c
  SITE (79): n equals a,t,g, or c
tgggccagcgcaagtaggtctacaagacgctacttcccctatcatagaagagcttatcacctttcatgatcacgcccnnataatcattttccttatctgcttcctagtcctgtatgcccttttcctaacactcacaacaaaactaactaatactaacatctcagacgctcaggaaatagaaaccgtctgaactatcctgcccgccatcatcctagtcctcatcgccctcccatccctacgcatcctttacataacagacgaggtcaacgatccctcccttaccatcaaatcaattgggccaccaatggtactgaactacgagtacaccgactacgggggactaatcttcaactcctacatacttcccccattattcctagaaccaggggactgcgactcctt

SEQ ID NO: 156 - DNA, 1029 bp, Homo sapiens
  SITE (1): n equals a,t,g, or c
natataggctcttgcamaaagctatttaggtgacactatagaaggtacgcctgcaggtaccggtccggaattcccgggtcgacccacgcgtccgctctctcaggaacacaagatgccgaaggggaagaaggcgaaggggaagaaggtggccccggcccccgccgtcgtgaagaagcaggaggccaagaaggtggtcaacccgctgttcgagaagcggcccaagaacttcggcatcggtcaggacatccagcccaagcgggacctgacgcgcttcgtcaagtggccgcgctacatccggctgcagcggcagcgcgcgatcctctacaagcggctgaaggtgccgcccgccatcaaccagttcacgcaggcgctggaccgccagacggccacgcagctgctgaagctggcgcacaagtaccggcccgagacgaagcaggagaagaagcagcggctgctggcccgggcggagaagaaagcggccggcaagggggacgtcccgaccaagcggcccccggtgctgcgagccggggtgaacacggtcaccacgctggtggagaacaagaaggcgcagctggtcgtcatcgcgcacgacgtggaccccatcgagctggtggtgttcctgcccgccctgtgtcgcaagatgggggttccctactgcatcatcaaggggaaggcccggttggggcgtctggtccacaggaagacctgcaccacggtggctttcacgcaggtcaactcggaagacaagggggctctggcaaagctggtggaagccatcaggaccaattacaacgaccggtacgacgagatccgccgccactggggaggcaacgtcctgggtccgaagtcggtggctcgcatcgccaagctggagaaggcaaaggctaaagaactggccaccaaattgggctgagcggacgtggctcgattttctctacataaaagtaataaaaagttgtctttcggccaccgtgaaaaaaaaaaaaaaaaaaaaaaaaaaaaaaaaaaaaaaaaaaaaaaaaaaaaaaa

SEQ ID NO: 157 - DNA, 212 bp, Homo sapiens
tattgcagacggtgaataatcccgaaattacgctgtatggcgttggcagtgtggaagcagaagttgggctacgcggggcgcaaacctcggcggaacacattaaaccggacgtcgtgatcgttttggataccgccgtagcgggcaatgttccgggcattgataacattaaatacccgctgaaactgggccaggggccggggctgatgctgttt

SEQ ID NO: 158 - DNA, 764 bp, Homo sapiens
  SITE (12): n equals a,t,g, or c
ttacctggagcnccccgcggtggcggccgctctagaactagtggatcccccgggctgcaggaattcggcacgagagactgacttctaggaaggctgtccacagctgcctcaggccgaaggctaactaggagaatattaggtcgtgtgcttggattcctgttctccaaacgattctaattaaaactagtccactacccccaccaacacgttcagaaggaaaaaaatgtagcagaatccccaaatgccctcatcacttcattataccatttgggtagctttatggcacctgtaggactagttcatgccaggcccatttgtaactgttttctctagttaaacatgatattgccattaacagcacattaaataggattacactgcttaagaatctaggaatttctcaaatatatgagaaaatgtgaaagcacagggataatagaaatttattttataaacacatgctaggagatggaattgtgtcatgatgatccacattaaagaaacatgattgaagtgaatccattatttatactctgactttccattatatatatatattactccaaaagaagttattcatgtttcctaattgtgagcttacccatcgtgtaaaattggscctaacacttattcacaggccacatctacttcgtacatgtactttgcctctgtatgtacacgtgtaacgsataaccgtatatcagctctgcaagatmcwtagatatccccattttatggtgacggagactgaggcttagagaaga

SEQ ID NO: 159 - DNA, 1284 bp, Homo sapiens
ctccagggcggcgaccgtgtcatcaacaccaactgctcggcggtgcgcactcgtaaggccctctgctgcaagatgtccgtggagtatgacaagttcattgagtccgggcgcaagtggttttgccacgtggatgatgacaattatgtgaacgcaaggagcctcctgcacctgctctccagcttctaacccagccaggacgtctacctggggcggcccagcctggaccaccccattgaggccaccgagagggtccagggtggcagaactgtgaccacggtcaagttctggtttgctactggtggggccgggttctgcctcagcagaggccttgccctcaagatgagcccatgggccagcctgggcagcttcatgagcacagctgagcaggtgcggctgccggatgactgcacagttggctacatcgtggaggggctcctgggcgcccgcctgctgcacagccccctcttccactctcacctggagaacctgcagaggctgccgcccgacaccctgctccagcaggttaccttgagccatgggggtcctgagaacccacakaacgtggtgaacgtggctggaggcttcagcctgcatcaagaccccacacggtttaagtctatccattgtcttctgtacccagacacggactggtgtcccaggcagaaacagggcgccccgacctctcggtgacaccaaccaccccgacccagggctgcctggctctktcccaggcgcggggaaccagagccccctatgggctcagtgggctccctcaggtgccacggccgcaccagtaagatgcaggcacctggsagaccctctggctagcctgcagccccccctctcccagcccctggtgggctgcggtgaatgggtgttttggggaggaacgaagacagccaggcttgatggccagggccgcagtgcccctcccccccgacccagccccaaggttgatcccaccgggaacaggcttcccaccccagcgacttgcgcacctgggaagggagctgccatccgggctccattacctgttgctgaaggsgggtgctaggytggctgggtgtcaaggagcaggttccaggccaaggtcctggcccagccacggccattgcaagggctcagcctggmaggttttgtgggggacgccgcccttthtgccgmgtggggtgcacggccgggaacacaktgggattmagccccgggaagtaattttttgaccagagttkttcccagtccaagggtatyggaggctttttwttccaaaaatttctttttggaaaa

SEQ ID NO: 160 - DNA, 1613 bp, Homo sapiens
  SITE (82): n equals a,t,g, or c
  SITE (1602): n equals a,t,g, or c
tcgacccacgcgtccgtaacttctttggtgacaaaactgattttcacccactcatggaccagttcatgaatgactacgtggnaagaagccaaccgggaaattgagaagtataaccaggagctggaacagcaggagtatcatgacctctttgagctgaagccctagaggaaggctgggcccgtacgtcctgcagaatgtccaccttggagatggacgaacgggtgtcttaacctcagctctgctggaggcctctcccttaaggggctgtctttgttctccttggcctgtgtgggctggcttgagtgcatgttgtctttattccctgtatagcgctgaagagcatcacctgcaccattgattttgggggtcgggggaatactcaaggatgagcagatggggcctgcccgtctacgtgtgcaactggcagtccaggagctctgggtttctgataacaggatctcctttgggctcttgaggttggggagaagcattaggattacacagaggagctactgggacttagaaggaaccctggctgcctgaactgtggccgtgtctgggaggcgaggccacgacaggcctcaagcctcaratgctgctccacgagagccatcttccccagtggagtgcctgcctcccctgctaggcccgtttccctgaaggagctggccgtactggcgtgggcccagtcctgggaggagcagcacagccttgcccaggcccagtccacagagccagcagcttgggttgagatgaatgatgtgttcacaaatgaggggatttcccttctggactaaactgaaggagaggcttgttgctttccagaggtgtgtggctcttaagttgacatcagcttttccccttgtgggtggttctttagctctcctgtcacaccattcgggtgtcctaatgtagggacaagagcaagcctgctgctcaggccccctggcgaggcttcacctcactgtggaagggggcgtcctgcagctggttagtcttaggcctggtggctgatcacttgtggggtcagtctccagcacccagcgctcccacaagccttgccaaggaaggcctgcttttcagccacaaacttcaggaaactcatccccccgctccccaaagtgttgttgctggccctgggcttgtgtggctcctgaggattgggaatttcaaataattgcaatacctgagttagaattccttctaatggcatcgttttaagctggaccataaagcagaggggaattacaagtgtgtcccatgcctgaccttcataattggtttgggggacaggggagtcacagccactgatatttaggtgatgtctcttaggacttcagtgcctcagctgcctgaactgtaaatgttttctgaatttcacatatttttttttgcatgccttaggaagaagcacataggtaaaaccagcagtttccagtaatatagggggtttttgagcaaggcccctggagcagcggagagacaagatggagcacatgtagtctgtgtgcctggtcacacagaggcctgcatgcaagtagcaaagcagctctcaagggcttgtcagtaaaatatattagaaaaaaaaaaaaaaaaaatggngggcccctcgt

SEQ ID NO: 161 - DNA, 1267 bp, Homo sapiens
tcgacccacgacgtccggcctcgggtgggccggggttgctgcgccgtcctccactactggctactggcgctgyagccatgcagcccccgcccccgggcccgctgggcgactgcctgcgggactgggaggatctacagcaggacttccagaacatccaggagacccatcggctctaccgcctgaagctggaggagctgaccaaacttcagaacaattgcaccagctccatcacgcggcagaagaagcggctccaggagctggccctcgccctgaagaaatgcaaaccctccctcccagcagaggccgagggggccgcacaggagctggagaaccagatgaaagagcgccaaggcctcttctttgacatggaggcctatttgcctaagaagaatggattgtacctgagcctggttctggggaacgtcaacgtcacgctcctgagcaagcaggctaagtttgcctacaaggacgagtatgagaagttcaagctctacctcaccatcatcctcatcctcatctccttcacttgccgcttcctgctcaactccagggtgacagatgctgccttcaacttcctgctggtctggtactactgcaccctgaccatccgggagagcatcctcatcaacaacggctcccggatcaaaggctggtgggtgttccatcactacgtgtccaccttcctgtcgggagtcatgctgacgtggcccgacggtctcatgtaccagaaattccggaaccaattcctctccttttccatgtaccagagcttcgtgcagtttctccagtactactaccagagcggctgcctctaccgcctgcgggcgctgggcgagcggcacaccatggacctcactgtggagggcttccagtcctggatgtggcggggcctcaccttcctgctgccttttcttttctttggacacttctggcagctttttaacgcgctgacgttgttcaacctggcccaggaccctcagtgcaaggagtggcagggttgtgcaccacaagtttcacagtcagcggcacgggagcaagaaggattgaggctgggccttcccctgccggcccagaggggcttctgtcctgtgtgttgtgggaggggatgggaggcgcccctcgagtgtgcgtgtatcagggggtctcttctattctcccttgggttttatgggcgctgtgggccctgaaggaagacctgggcccagtgccctcaataaagagaggcccagaggtggaaaaaaaaaaaaaaaaaagggcggccgctcta

SEQ ID NO: 162 - DNA, 1667 bp, Homo sapiens
gggctgcaggaattcggcacgagtaaatatttaaggtggtttactttattttaataatttaatttaccccaaagtccctaaggtaatttattggaggttgaaacatgcattcttgccactgggacaacatgaggcctctaacagcacgggcaggcatggggtcccctgggtggacgaggccgcttggcagccaggtttggagacctggcctcctggtcagctttggagggcccctcaacagagctggagccctgcaccccaacacggctggccatgtggcctcagaacactacttattactcaatgcctggtacttggccagccccagcggtcagtctataaatactcactgacaaggtggagggctggacggccatcaccactccccagacgttctccattgcctgtctcatttccctccctccctctgacacctttcttcatgagtcgaacgtggattactaaagctctattaagagtgtggagatccctccaagtttcccaaatgagaactcacaggaaaacaggactgaactttgagaatgttgtttatcgcagctttgcacataaacctgagtgtctcccagcctgcctcggttctcaccagcctgccagccttttcaccagcctctctccttagccttatggcctttcacggctcttctccctgccccagctctgctgcccgcccttcctcacgtcccctgtgagctgcctgagccattggttggatttcgatgtggctcattgcagcatgtggggcagcgcctcccatggcctcgccttggtgccggtgaaccccttttggttgcacacatgctccccacacacacatagacatcagccttcctgtaactgactggggacccagagtggaaacaccaggatggatcagcttgtctgcagaattgcccatcaggaagaccaaaagccagtagctttgctgatctgcccccaggactctggaggcgcccctgcactcccacctcccacctgtcagttcccagacccacccattcgggatcacctggaccagttaccccaagtcctgcatctcccttccctgcaggctgaacaccagggtcatgccagtcccgccagccgcctcctccatgccccagtgactggtgtgggcagagcaggcagccagtggagctgtgggccagttccgctcttggatgctgctgctctcacccatgaggtcaggggggccctccaaggttatctccaggtgaggggattcacatcaggccacaagccaccagaggccttctgccacctcccagagcgacagccagggaggctgcgtactcagcctcggggagaaatccccgtgggacctgagccccaagacctacggaccactcagccttaccatcgtaccgtccaggattgtccttgccatctttgttgtctcagccagaccttggttttcagtaaagccccagtttctacttcctgcatgccactgtgcaaggccactcatcactgttcctgcagaagcctctggacgtggggctggatggggttgaaaatgttacatgtaaatattggtttggttcggtttttagcattttacttggtaactggttgttttcttttttggggtggggggattggtttgtaaaaattctctatcttttggaatgtaaaaaaaaaaaaaaaaa

SEQ ID NO: 163 - DNA, 324 bp, Homo sapiens
  SITE (279): n equals a,t,g, or c
gaatgaattggarggaaaccgaggcgctgccctggccaggttgctgccccgcacccttccggagcaccgaagtcctgcccggcaacggacttggagctgccgcagagtcagcctgagcccgaggcaggggtcgcgcccggatgcgggtctctgcgccgccccgsgaggctcctggccttgccctccctgccctttgttgtgtaataagacctgtggcggctccactgagacccacacgtgcaactccgcgcctccgcgttaaaggaggtgaaacgcagnagccctgagaaaccccgagaccccggtgtcctagcagaggcgccc

SEQ ID NO: 164 - DNA, 1432 bp, Homo sapiens
tctaatctctgcctccatccttacgcagctttctcccctgtgtttctgtgggtctcaggtctctctctcccttctcaggacacctgccatgtgatttaggacctaccttaaatccaagatgatcccaacttaattacatctgcagagactctttccaaataaggtcacacttccaagttccagagcagtggttagggcttggacctatcttttggggcacacttttcaacctactacaaagacaattgtccacttcatagaaaaagagctggtcatatcagcgatggtatagaccagggcccagcaaattctgtctctaaagggccaggtggcttgtggggctctgtaggtaagacctttgtagcagaaagcagccacagaggagacgtaaactgacaggtatagctgtgttccggcaaagctttatggacagtgggccaggtgcggtggctcacgcctgtaatctcagcactttgggaggctgaggcaggcagatcacttgagatcaggagttcaagaccagcctggccaacatggtgaaaccccatctctactaaaaatacagaaatgggccaggcgcggtggctcacacctgtaatcccaacattttaagaggccgaggcgggcggatcacaaggtcaggagatcaagaccatcctggctaacacggtgaaaccctgtctctactaaaaatacaaaaattagccaggtgtggcggcgggcgcctgtagtctcagcctcctgcgtcgtggaaatattcttcataatatagttgagtgaaaatgacacgttaagtcgctgggcgcggtggctcacacctgcaatcccggcactttgggaggccgaggagggtggatcacctgaggtcaggagttcgggaccagcctggccaacatgaggaaatcccatctctactaaaaatacaaaattagccgggtgtggtggcacacggttgtaatcccagctactcaagaggctgaggcaggagaatcacttgaactcgggaggcggaggttgcagtgagccaagatcccaccattgcactccagcctgggcgacagagcaagactccgtctcaaaaaataaaaataaaaaataagttgggaatcaccccactgcccctgaaagtgggatttcagtggcacgtcccattctctttagaccatgctcgacagctgaccaaggccatgatgcgaaaggccacggccagccgcctggtcacgcagcgcgatgcggacgtgcagaacttcgtcagcttcatctccaaagactccatccagaagtccctgcagatgtacttagagaggctcaaagaagaaaaaggctaacgattgggctgccacaggcttacggccacacgtgcccctgtgggtcccagggaggtcttaaacaaggttttttcaacttaaaaaaaaaaaaaaaaaaaaaaaaa

SEQ ID NO: 165 - DNA, 560 bp, Homo sapiens
tcgacccacgcgtccggcgccgagcggtggcgtcgttgtcgccccctcctcgtcgggaagaatcgtttggtctcctgccgtgcccggaatcccagtcagaagttccagcctgccactgttctctgatgccatgccagcaccaactcaactgttttttcctctcatccgtaactgtgaactgagcaggatctatggcactgcatgttactgccaccacaaacatctctgttgttcctcatcgtacattcctcagagtcgactgagatacacacctcatccagcatatgctaccttttgcaggccaaaggagaactggtggcagtacacccaaggaaggagatatgcttccacaccacagaaattttacctcacacctccacaagtcaatagcatccttaaagctaatgaatacagtttcaaagtgccagaatttgacggcaaaaatgtcagttctatccttggatttgacagcaatcagctgcctgcaaatgcacccattgaggaccggagaagtgcagcaacctgcttgcagaccagagggatgcttttgggggtttttg

SEQ ID NO: 166 - DNA, 562 bp, Homo sapiens
  SITE (418): n equals a,t,g, or c
  SITE (488): n equals a,t,g, or c
  SITE (494): n equals a,t,g, or c
  SITE (541): n equals a,t,g, or c
  SITE (545): n equals a,t,g, or c
ggtgccaccgcggcgcgtgagtttcgccctgtcttgtattaagtctgctcttccaggttcctggcgcttctgtacctgggacttgggatccccacaaacctggaaattctcagccgtcttccttcactcagagcaaattgagacgaccccgtgagaggccgtggttttctcccttasatgccttttatgaacaagattttactagaagacatcactattactggattcttcatgaaagagcactggctgatatttatatcgggctattagctgastggtagtctgcctggtygcaattgcttctatagttgattgaatgctcttaacacggagagacaggataccttcaagtttctccctgttgcagtgggagtaagaagaaagatggtctaattgtttcaagtacacaagcccttgnccattttcctggcaactgcggtaggctgtggcccacagatccaatagagaccagagggtgcttgccagangcctgnacagactttttggggaactgggtactgatgaaacccgaacatggaanttgnttctgggttttaaattc

SEQ ID NO: 167 - DNA, 2162 bp, Homo sapiens
  SITE (1783): n equals a,t,g, or c
  SITE (1863): n equals a,t,g, or c
  SITE (2123): n equals a,t,g, or c
  SITE (2161): n equals a,t,g, or c
gctggactctcgggcagagctttgtgagagaaacaaggctggcttcaagtgatctgcaaccagagtaattgggatttgacaaggactgtgaaaggctgactctccctgttctctttcatgctggcaccgggcagagtgtgggaactactgcctcaatacgatcatagaagccattgagatcccgcagtttatcggccgcagttacctgacgtatgacaacccagatatcttgaagagggtgtcaggatcaagatcaaatgtgttcatgaggtttaaaacaactgccaaggatggccttttgctgtggaggggagacagccccatgagacccaacagcgacttcatttccttgggccttcgggatggagccctcgtgttcagctataacctgggcagtggtgtggcatccatcatggtgaatggctccttcaacgatggtcggtggcaccgagttaaggccgttagggatggccagtcaggaaagataaccgtggatgactatggagccagaacaggcaaatccccaggcatgatgcggcagcttaacatcaatggagctctgtatgtgggtggaatgaaggaaattgctctgcacactaacaggcaatatatgagagggctcgtgggctgtatctctcacttcaccctgtccaccgattaccacatttccctcgtggaagatgccgtggatgggaaaaacatcaacacttgtggagccaagtaacaccagctggccttgtccaagggacagagccttctattctgagaatcccaggggccctcagaccctgcctgatgctatatgcagaggcccagggaccaggtgtgtttcctctcaccaagaagaaagtacacactgatgagaaactgagaaccaagacaggcatccctgggtggcctttcctgctgacactccacgagctgacccagcagaattctctgtgtaggaagcatcggactttgtccattgaatatgtagcggctgccagagatcacacatcaatgcaaattccagagcctgtctgctatagctcagtgactgtgttgtgattcatagtacattaaaaagagagagagagagaaagaatcccacagggcactattaaaatacttctctccttccctgactcatgacactcttcctgacagcagaatgactgtgtgaccttgaacttcacatttcccacattggcccttggattgttcggattaaccccttccactcctcactggctggttcactgtgttctgactagtccataaaaataaagatggaaggagatcaaacacagaatcataatcataatgcggcccccttccccagagcttacctcgaatgtgaaatccctacttcttataatgcagagttaaggagctgagcccccatgattttgtagctgtacttttgtatgtgtatatttttatagctgcagattgtccacacagtatacttttggaagtttgggtggatgactctgaattcttgcacacctttcctaaaaatttctcccaagagagacttgtttgggccttttgtggtgtcagtggaatggataggtaacttgggtgggcaacttggggagctgaccattctcttttggtaaatgttgacggctcaagaggatgaatatgaagctttccaagataagcagattaaaaggaacatgtgttaccgaggtaggtcactgtcatttttgttttaagagttggggggagtatctatagtaaacttgaataaaggggacaaagctagaacttattcattcattcattcacttatggngttgttactgattttgcggaggtcaggttcataccaatggacactaatacaatcagtgttcccaaggctgtgcaggggtngggggacatgctgtcaggatggtctgagcatctgggtgagaaccagagaaacaggacttcttccttctgtaccatgagctgtgtccctttactatgcaagcacatgaccccagagacagctggtttcactggcagatccccatgatggacttactaagggaaaggtgagatgaacactgcccccaaggagggggtgaaatatgatctaacttatgcaagagcctataattagtcccagtcttcgactctacatttgtttntgcagcatttcattcagcaaagacttttttggggtttnt

SEQ ID NO: 168 - DNA, 2247 bp, Homo sapiens
  SITE (35): n equals a,t,g, or c
  SITE (2123): n equals a,t,g, or c
  SITE (2126): n equals a,t,g, or c
  SITE (2128): n equals a,t,g, or c
  SITE (2193): n equals a,t,g, or c
  SITE (2194): n equals a,t,g, or c
  SITE (2198): n equals a,t,g, or c
  SITE (2233): n equals a,t,g, or c
  SITE (2235): n equals a,t,g, or c
tgttggccccaaaatcacgggctttycaaaatgtngtacaactcggccccattgacgcaaatggcggtaggcgtgtacggtggaggtctatataagcagagctcgtttagtgaaccgtcagatcgcctgaagacgccatccacgctgttttgacctccatagaagacaccgggaccgatccagcctccggactctagcctaggccgcgggacggataacaatttcacacaggaaacagctatgaccactaggcttttgcaaaaagctatttaggtgacactatagaaggtacgcctgcaggtaccggtccggaattcccgggtcgacccacgcgtccgctggaagcagtatcgccgagaagaaagcatctggggttttccaggaaacacaaacgcagacagtgtgtgcactacagactccagcctccctttgaagccaggttcctgcgctttctccctttagcctggaaccccaggggcaggattgggatgcggatcgaagtgtacggatgtgcatataaatctgaggtggtttattttgatggacaaagtgctctgctgtatacacttgataaaaaacctttaaaaccaataagagatgttatttctttgaaatttaaagccatgcagagcaatggaattctacttcacagagaaggacaacatggaaatcacattactctggaattaattaaaggaaagcttgtcttttttcttaattcaggcaatgctaagctgccttccactattgctcctgtgaccctcaccctgggcagcctgctggatgaccagcactggcattccgtcctcatcgagctcctccacacgcaggtcaacttcaccgtggacaaacacactcatcatttccaagcaaagggagattccagtaacttggatcttaattttgagatcagctttgggggaattccgacacccggaagatcgcgggcattcacacgtaaaagctttcatgggtgtttagaaaatctttattataatggagtggatgttaccgaattagccaagaaacacaaaccacagatcctcatgatgggaaatgtgtccttctcatgtccacagccacagactgtccctgtgacttttctgagctccaggagttatctggctctgccaggcaactctggggaggacaaagtgtctgtcacttttcaattttgaacgtggaacagagcaggacatttgcttttcggcgaacttcaacgtggttcagggagtttcgtcctctttcttaaggatggcaagctcaaactgagtctcttccaggcgggacagtcaccaaggaatgtcacagcaggtgctggattaaacgatgggcagtggcactctgtgtccttctctgccaagtggagccatatgaatgtggtggtggacgatgacacagctgttcagcccctggtggctgtgctcattgattcaggtgacacctattattttggaggctgcctgggcaacagctctggctctggatgtaaaagccccctgggaggatttcagggctgcctaaggctcatcaccattggtgacaaagcggtggatcccatcttagtacagcaggggtcctggggagtttcagggacctccagatagactcctgcggcatcacagacagactccgcgtggacggtggtgcggcacggtggccccgacgcggtgaccctccgaggtgcccccagcgggcacccgcgctcggctgtgtccttcgcgtacgcagcgggcgcggggcagctgcgggccgcggtgaacctggcggagcgctgcgagcagcggctggctctgcgctgcgggacagcgcggcgcccggactcacgagatggaaccccactgagctggtgtgttggaagaaccaatgaaacacacacttactggggaggttctctgcctgatgctcaaaagtgtacttgtggattagaggggaacctagttctagatcgcgggcggccgctctagaggatccctcgaggggcccaagcttacgcgtgcatgcsacgtcatarctctctcctatagtgagtcgtattataagctaggcactgccgtcgttttacaacgkctgactgggagatctgctascttgggawctttgtgaaggaaccttacttctgnggngngacataattggacaaactacctacagagatttaaaactcttaagggaaatattaaaatttttaanngtantaatggggttaaactaacttgcatatgccttgctngnttgaaaagtttt

SEQ ID NO: 169 - DNA, 1871 bp, Homo sapiens
gcggccgcgtcgacggcccatatgcggctggagttccacaacattgagacgggcatcatgacggagcggcggtttatctccgtggtgccctccaacttcatcgggcatctgagtgggctcgtgttcaatggccagccctacatggaccagtgcaaggatggtgacatcacctactgtgagctcaatgctcgctttggcctgcgtgccattgtggccgatcccgtcaccttcaagagtcgcagcagctacctggcactcgccacgctccaagcctatgcttccatgcacctcttcttccagttcaagaccacggcccctgatgggcttcttctgttcaactcgggcaacggcaatgacttcattgtcatcgagctggtcaaggggtacatccactacgtgtttgacctggggaatggcccgtccttgatgaaggggaactcagacaaaccagtcaatgacaaccagtggcacaacgtggtggtgtccagggacccaggcaacgtgcacacgctcaagattgactcccgcactgtcacgcagcactccaatggcgcccgaaacctcgatctcaaaggggagttgtacattggcggtctgagcaagaatatgttcagcaacctgcccaagctggtggcctcccgggatggctttcagggctgcctggcctcagtggacctcaacggacgtctcccagacctcatcgccgacgccctgcaccgcattgggcaggtggagaggggctgtgatggccccagcaccacctgcactgaagagtcctgtgccaaccagggcgtctgcttgcagcagtgggatggcttcacctgcgactgcaccatgacttcctatggaggccctgtctgcaatgatcgtgagtgcctgggagggctgggggcagtttggggagaccagggtccttcccagccataggggctgccagggaggaaacagggcctctgagcattcaggagctgtgctgcttcttccttctcatcccttgtctgcagagtcccaggggagctgtggcctgctgtcccctcatagggtctttctcctggggctgtgcaggattgctgctgcctgaagctctggggggacccactgatagatggcctctcctccttgttctcagctggtgggaccctgctcccttcacccaaaaccaaaggtgttggccttagtggggtgaacttgctgctgtcctgtgtagttttggtgatggccttacatgtacttgtacctcacacagacacactattgcacagggaggggggctgttaacaatctgcaccccctttggtgccctcagggcatgaagtgggaatctgttatttcctgctgagagcaggaccacaccccagaggacaggctctggaggcttccaggaggccaggctgctggacagctggtttccctggaatgggctcctctttcttccccaataatcccggctgcagtttgtccccttgagccacaaggtcactccctactgtcttcgcttggttcttttcctcctaggctggacatctgattgccaacttgcattctgtttgaggcccctccccagagagggcagggtcagcagcagctcccagtccctagtggttggtggcctgcagctggttagagccctgcagagggagggcagctgaggcaggaatggcggggaggcaaccttctactctgtggggtagctttggcatttcccttggatgatggggctggagtgggtgggcagagtgcagcctcctcagcattgcttgaatcatcttccctggggtcctgctgagagaccaagcagaaaagtcaactgcctgggaagaaacacacacaggcacgcacacacacatgcacacacagtcgacgcggccgcg

SEQ ID NO: 170 - DNA, 420 bp, Homo sapiens
  SITE (388): n equals a,t,g, or c
  SITE (389): n equals a,t,g, or c
  SITE (395): n equals a,t,g, or c
  SITE (416): n equals a,t,g, or c
ggcacaggctggctggctgtcggatcagaccgtgagtatcccatccagaccccacgagaggcctgttacggagacatggatggcttccccggggtccggaactatggtgtggtggacccggatgacctctatgatgtgtactgttatgctgaagacctaaatggagaactgttcctgggtgaccctccagagaagctgacattggaggaagcacgggcgtactgccaggagcggggtgcagagattgccaccacgggccaactgtatgcagcctgggatggtggcctggaccactgcagcccaggtggctagctgatggcatgtgcgctamcccatcgtcacacccagccagcgctgttggtggggggttgcctggtgttcaagattnntttctntttccccaaccagatgggttnccca

SEQ ID NO: 171 - DNA, 1026 bp, Homo sapiens
  SITE (1017): n equals a,t,g, or c
tgggccaggcctggtagacggggctgacctgctgggggtcttgccgcctggcacataccctagcgatttcgcccgggacacccacttcctgcacctgcgcagccagcctcggttcccagcagctcttgggcctgccccgagacccagggagcagcgtcagcggcacctttggctgcctgggtgggaggctcakcatccccggcacaggggtcagcttgctggtgcccaatggagccattccccagggcaagttctacgagatgtatctactcatcaacaaggcagaaagtaccctcccgctttcagaagggacccagacagtattgagcccctcggtgacctgtggacccacaggcctcctgctgtgccgccccgtcatcctcaccatgccccactgtgccgaagtcagtgcccgtgactggatctttcagctcaagacccaggcccaccagggccactgggaggaggtggtgaccctggatgaggagaccctgaacacaccctgctactgccagctggagcccarggcctgtcacatcctgctggaccagtgggcacctamgtgttcacgggcgagtcctattcccgctcagcagtcaagcggctccagctggccgtcttcgcccccgccctctgcacctccctggagtacagcctccgggtctactgcctggaggacacgcctgtagcactgaaggaggtgctggagctggagcggactctgggcggatacttggtggaggagccgaaaccgctaatgttcaaggacagttaccacaacctgcgcctctccctccatgacctcccccatgcccattggaggagcaagctgctggccaaataccaggagatccccttctatcacatttggagtggcagccagaaggccctccactgcamtttcamcctggagaggcacagcttkgcctccacagagctcamctkcaagatyttgcstgcggcaagtggaagggrarggccagatattccagctkcataccaytytgcagagrcacngctggctcc

SEQ ID NO: 172 - DNA, 532 bp, Homo sapiens
ttttttttttgcacacaaatgttcatggyacctttattcacaatagccaaaaactggaaacacatcaaatgtccacaggtgaatgaagaaataaattgtggtatatctgtacaatagaatactacctagtaggaaaaagaacgaaatgctgatacacaaaaccatagatataattcaaaaacatgctgcgtaaaaataagccagatacagaagagtacatgatgcattaaattctagagtagggtaaactaatttgcagatagaaagcacatccctggttgcctggggcaaagtgggtggcgaarggcagaaaggaacttttagagatgatgaaaatattctatatcttgatttcatactgggtaagatatatatatatgtgtgtgtgtgtgtgtgtrtatatgktaaaacccatattcctcatgacttaaagtgagtgcattttattgcatgraaagtataactcaataaagktaattcttaaaatgtcaaggtcawgaaaaagcctaaaggactggttcaggttaaagga

SEQ ID NO: 173 - DNA, 736 bp, Homo sapiens
tccgggaattcccgggtcgacccacgcgtccgctcaggatgactgtggagaaggaggcccctgatgcgcacttcactgtggacaaacagaacatctccctctggccccgagagcctcctcccaagtccggtccatctctggtcccggggaaaacacccacagtccgtgctgcattaatctgcctgacgctggtcctggtcgcctccgtcctgctgcaggccgtcctttatccccggtttatgggcaccatatcagatgtaaagaccaatgtccagttgctgaaaggtcgtgtggacaacatcagcaccctggattctgaaattaaaaaraatagtgacggcatggaggcagctggcgttcagatccagatggtgaatgwgagcctgggttatgtgcgttctcagttcctgaagttaaaaaccagtgtggagaaggccaacgcasagatccagatcttaacaagaagttgggaagaagtcagtaccttaaatgcccaaatcccagagttaaaaagtgatttggagaaagccagtgctttaaatacaaagatccgggcactccagggcagcttggagaatatgagcaagttgctcaaacgacaaaatgatattctacaggtggtttctcaaggctggaagtacttcaaggggaacttctattacttttctctcattccaaagacctggtatagtgccgagcagttctgtgtgtccaggaattcacacctgacctctgg

SEQ ID NO: 174 - DNA, 562 bp, Homo sapiens
  SITE (424): n equals a,t,g, or c
  SITE (526): n equals a,t,g, or c
  SITE (545): n equals a,t,g, or c
  SITE (547): n equals a,t,g, or c
gctctgcagacaggtgggccaatgtgaaggtggagtgcgagccgagctggcagcccttccagggccactgctaccgcctgcaggccgagaagcgcagctggcaggagtccaagaaggcatgtctacggggcggtggcgacctggtcagcatccacagcatggcggagctggaattcatcaccaagcagatcaagcaagaggtggaggagctgtggatcggcctcaacgatttgaaactgcagatgaattttgagtggtctgacgggagccttgtgagcttcacccactggcacccctttgagcccaacaacttccgggacagtctggaggactgtgtcaccatctggggcccggaaggccgctggaacgacagtccctgtaaccagtccttgccatccatctgcaagaaggcaggccarctganccagggggccgccgaggaggaccatggctgccggaagggttgacgtgcacarccatctgtatggctgggagaagaccaagtgacctacagtgagggcccggngcctgtgcactgacatggntnttaactggtcaccat

SEQ ID NO: 175 - DNA, 719 bp, Homo sapiens
  SITE (232): n equals a,t,g, or c
  SITE (548): n equals a,t,g, or c
  SITE (645): n equals a,t,g, or c
  SITE (659): n equals a,t,g, or c
  SITE (671): n equals a,t,g, or c
  SITE (701): n equals a,t,g, or c
  SITE (702): n equals a,t,g, or c
ttttttttttacacacattaactctttacacatattagcactttacacatatttaagactcatgtcatccctatgaggaaaggatcattattcccactggacagatgagaaaactgaggctcagaggatgcacagctaaaagatggcagagtcatgatcggagccaggcagtttggtttcagagcttgtgctcatagacactacaccacagtgcaccaatgatctgtttatngggaagccctggggctcggtgctggcagggccagtccaccctggcctccctcctcgcttcaccaaggcaagtcaaagaaggggctcaccgggctggtcccggttccagtgggtgtacatgacttcatccccactgagccagaagaaggagccggtgctgttgaggtcctgcagggccgtccagaagtactcgccctcccagttgtagatgaggctgctgacgaaggcctgctcgaacctgttggtgatggtgaccagctgagagccatggtcagtgcacatgcgccgggcctcactgtaggtcacttggtcttctnccagccagtagcaggatggggctgttgccacgtccaacccttccgggaagccatggtcctccttcgggcgggccccttgggctcaagcttggccttncctttctttgcaanaattgatttgcnaaaggactttggtttaaaaggggacctttnnggtttccaaagcgggcc

SEQ ID NO: 176 - DNA, 752 bp, Homo sapiens
  SITE (610): n equals a,t,g, or c
  SITE (613): n equals a,t,g, or c
  SITE (614): n equals a,t,g, or c
  SITE (648): n equals a,t,g, or c
  SITE (690): n equals a,t,g, or c
  SITE (727): n equals a,t,g, or c
gtaagctttcagcagatgacgtggcgaacaaatatgactggcatggcagggctagctggcctgaagcatgacattgcccgtgtaagagctgacaccaaccagtccctggtggaactttggggcttattagaattttgtggccaaggcccatggctctccacgggtgtactggctggggctgaatgacagggcccaggaaggggactggaggtggctggatgggtctyctgkgacattaagcttctgggagccagaggaacccaataacatccacgatgaggactgtgctaccatgaacaaaggtggcacctggaatgatctctcttgctacaaaactacgtattggatttgtgaagcggaaatgttcctgttgaagcccagggctgaggctggggggtccatatcttgagtgtctctttgagatgaagaatctcctgccctttcgtggacggccttgcctcttcgtgagtggacacacagatgtgcctcaaacaggattgcaccctggatgcagcaagttcccaggggtgcaagtcaagctgtttctagaagtgaggacttgggcttggcctaataaatggtgagcttggaaggatgcttaaaacttggnggnnggagggcttccaattctgggggttgaagggatcnttactaaagttccggacaatgacttttgggaagggaactagnccttgaggacctgggctggggttaacctgggatgaanaaccggggcttgaacccaaaagttg

SEQ ID NO: 177 - DNA, 869 bp, Homo sapiens
  SITE (15): n equals a,t,g, or c
  SITE (861): n equals a,t,g, or c
catttggaacgaccncgtcgacctctagaacactttggggctctgcactgcgttcattgtaatccgtgatacaatgactacaaatgtgtcgcgatttctaatcttcatctgtatctcaggcgattttccagggcttccattctctgtgtcatttcttctaagcgctgtgttaattttcttacttcttcgtttgcaaggttctggamcattataaggttttcacatttgcattgatcgtgtttttcttccaaagggcttcctgaaggttttgttgaatgggaaagcttttgtgtagaccgtaaaagattgtcttcttcaacagatatctgtgttgcactgcaaaattagamcaggaaagtaggtcttggatatttatggtgactggctcagattctgttggctgttggaccgtttttggcagttcccctgctggagagtcctgtcttccatcggagtcttctagagcttcacagatgcctttcttgagtttttcacttatctcatccattgtgctgaagtcttcggcatagaagagatgcttgtttgtgggctcagaggcaatctcttgtagttcctcctcaatggcttttcctaccccaacagcatacatagtgataccattggccttggctttactggcccactcggagacgtcatcctragcccgtccgtcggtgaacacaatggctgctctgggcacccttgtggaaaggggcctggccccttctccttgggtaaaacttctctcaaacatgtgtttcagggccagcccagtcatagagccctttcccatgtatttcatgtgggccacggcttttttcatgtctttggctgagttgaagtttctcagagtgaactctnagtggacc

SEQ ID NO: 178 - DNA, 450 bp, Homo sapiens
  SITE (230): n equals a,t,g, or c
  SITE (283): n equals a,t,g, or c
  SITE (391): n equals a,t,g, or c
  SITE (410): n equals a,t,g, or c
attttttttttttttctgaagtggtgaattttaatattgtataaaaaatccaacttgttccacaagtacatatgtcctatgattttatgcatacatccatatacatatatcaaggtaaagtccagtacaaaaaaacagcatttcctatggccagtgttctacagaagtaagactgtgcaaactttatcgtatagtcaaatgagattgcacactaaggcaggatgaggcanaagcaagttggttcccagtatattacaaaataccttgcatagcttattcattntcacctggtaaattcatcttagaattctgaaggatttttttcctagataaatttatcaagttagtgtatacttcttggctttgttctgtggcaaaccaggtttctcantactgattggtttactttncaacattatggatttaacaatagcctgagctttgggggct

SEQ ID NO: 179 - DNA, 645 bp, Homo sapiens
  SITE (557): n equals a,t,g, or c
  SITE (572): n equals a,t,g, or c
  SITE (613): n equals a,t,g, or c
  SITE (629): n equals a,t,g, or c
  SITE (633): n equals a,t,g, or c
gggatttctggcttgtgggcccttatatgcctatagatgtggacatttgcattacacaactggaatctgttctgacgtcagccccacatttcaagtcgtgaattccattgcccctgtacaagaatgcagcactcaactggacatagtcatagtgctggatggttccaacagtatttacccatgggacagtgttacagcttttttaaatgaccttcttgaaagaatggatattggtcctaaacagacacaggttggaattgtacagtatggagaaaacgtgacccatgagttcaacctcaataagtattcttccaccgaagaggtacttgttgcagcaaagaaaatagtccagagaggtggccgccagactatgacagctcttggaatagacacagcaaggtggaaagctaattacccatgctctcacttcatctgcctgctaagatgactgttttaagaaggttaaaaaagttaataatgatcctgcaaagaatggattggatattcaaaattttataatttcatgtacagcttttgcctcatgaatactagaaaancatctggctctaagntatatgggggcccaagagaaaatacccccaaacaggatggngaaagggaggcattcncggnaagccccgggct

SEQ ID NO: 180 - DNA, 619 bp, Homo sapiens
  SITE (432): n equals a,t,g, or c
  SITE (503): n equals a,t,g, or c
  SITE (548): n equals a,t,g, or c
  SITE (614): n equals a,t,g, or c
ttttttttttttttttttaggaaagatcgagttccaaagtaattagctacttgacatcctctacctaaggcagaatagggaatgccataactcgttatcctcaacagccagtcaccattgaaaactcaaggaaaaatctgcaaagaagtaacatgatttagacaaatacagtgaaccaatgtttcattgccatggattttaaggcaaatttccatgaagacctttaaaatgggcaaggagywwaatacagagaaaataagtgaacaaagaagttattgcataagagcactcttgtagtagctcaatatgaaatgaagaaacaaacaaacaaaaaaaacccaaaccagaggtagtaccctcattttccaaatctatgtaacagaaaaggaacaaagcacatggaaacatttttgtcctggcacatctacattnaccattgtcttcatcggttgtcccatcagcactgccctaccatgcccttacaaagagagtctctagcaganacagtgttgtgagaaacagccatcttaatggcagatttatataanagagcattgttccatgctagatattgtacacagtaaaaaaaaaaaagtattactgatgtattaggnataaa

SEQ ID NO: 181 - DNA, 278 bp, Homo sapiens
  SITE (11): n equals a,t,g, or c
  SITE (12): n equals a,t,g, or c
cagccaggaannrttacgtgttccaggtacaggccatgaattcagctggtctggggcaaccgtccatgcccactgatcccgtgctcctggaggacaagccaggtgcccatgagatcgaggttggtgtggatgaagagggctttatctatttggcttttgaagcccctgaagcccccgactcctcagagtttcagtggtccaaagactacaagggcccactggacccccagagggtcaagatcgaggataaagttaacaagtccaaggtcatcctgaaa

SEQ ID NO: 182 - DNA, 1355 bp, Homo sapiens
  SITE (44): n equals a,t,g, or c
  SITE (55): n equals a,t,g, or c
  SITE (126): n equals a,t,g, or c
  SITE (132): n equals a,t,g, or c
  SITE (164): n equals a,t,g, or c
  SITE (1346): n equals a,t,g, or c
ggagataattttttaattccagcaaaagcggcacttcccttcgntccaggatgtnaatgttccagccggagatcagtttgatcactgggtttctgatctcatgactcagttcttcagttctccagntcttcntcggtaagcgtgtggcttgcggagatgtcttnatcggcatcagtgactatgactgagtaggtgcccaaatcctcgaggccggttctttcaggatgaccttggacttgytaactttatcctcgatcttgaccctctgggggtccagtgggcccttgtagtctttggaccactgaaactctgaggagtcgggggcttcaggggcttcaaaagccaaatagataaagccctcttcatccacaccaacctcgatctcatgggcacctggcttgtcctccaggagcacgggatcagtgggcatggacggttgccccagaccagctgaattcatggcctgtacctggaacacgtaactctttcctggctgcaagtcggaaaccctcaggtgggtgccagagatggggcctggggtgaccggcttccactgctcagagccttcctcctggaaactgacgtgatagcctgtgacaggcccagcccccatatacagtgggggttcccactgcagcaccagggatgtagcccgcacctcggatgcccgtacatcgtacggggggcctggctggggcattgtccactctttgcactcaaacaggctgctgggtgccgacagctcgccaacacctgcccagttggcagcccgggcacggaactcatagaagtggccttcatgaaggtcactgaccttgcagacccgggtggggatgggctcgtgccgaattcctgcagcccgggggatccactagttctagagcggccgccaccgcggtggagctccagcttttgttccctttagtgagggttaatttcgagcttggcgtaatcatggtcatagctgtttcctgtgtgaaattgttatccgctcacaattccacacaacatacgagccggaagcataaagtgtaaagcctggggtgcctaatgagtgagctaactcacattaattgcgttgcgctcactgcccgctttccagtcgggaaacctgtcgtgccagctgcattaatgaatcggccaacgcgcggggagaggcggtttgcgtattgggcgctcttccgcttcctcgctcactgactcgctgcgctcggtcgttcggctgcggcgagcggtatcagctcactcaaaggcggtaataccggtatycacagaatmaggggataccaggaaagaacatgtgagcaaaaggccagcaaaaggccaggaacccgtaaaaaggcccncgttgctgg

SEQ ID NO: 183 - DNA, 753 bp, Homo sapiens
  SITE (1): n equals a,t,g, or c
  SITE (2): n equals a,t,g, or c
  SITE (5): n equals a,t,g, or c
  SITE (724): n equals a,t,g, or c
  SITE (735): n equals a,t,g, or c
  SITE (746): n equals a,t,g, or c
nnatngctttygcaaaagctatttaggtgacactatagaaggtacgcctgcaggtaccggtccggaattcccgggtcgacccacgcgtccgagaatattccatagttttggaagcaagggacggtggaggaatgattgcgcaatgcacagtggaggtagaagtcatagatgaaaatgacaacgccccagaagtgatattccagtctctacccaacctaattatggaggacgccgagctgggaacacatattgctttgctcaaagtccgtgacaaggattccagacacaatggagaagtgacttgtaaattggaaggtgatgttccatttaaaatattaacttcttcaagaaacacgtataaattagtgacagatgctgttctagaccgcgagcagaatccagagtacaatataaccgttacggcaacagatcggggcaagcctcccctctcctccagttccagcatcaccctgcacattggtgatgtaaatgacaacgctccggttttctcacagtcttcctatatagtccacgtggccgagaacaacccgctggagcctctatttcacaagtcagggcttctgatccggacttggggcccaacggccaagtctcttactgcatcatggccagtgacctggagcagcgggagctgtcatcctacgtgtccataagcgcggakagyggrtggtgttcgcgcagcgcgccttcgaccacgagcagntgcgcgccttngactacactgnaagcccg

SEQ ID NO: 184 - DNA, 741 bp, Homo sapiens
  SITE (2): n equals a,t,g, or c
  SITE (740): n equals a,t,g, or c
cngctcgaattaaccctactaaagggaacaaaagctggagctccccgcggtggcggccgctctagaactagtggatcccccgggctgcaggaattcggcacgagcttcgtgccaaggctatagacagaaaaactgggcggcaggtggaaccggaatcggaatttatcattaaaatacatgatatcaatgacaatgagccaaaatttacaaaagacttatacactgccagtgttcctgaaatgtctggagtcggtacatctgttatacaagtaactgcaacagatgcagatgacgccaactatggaaatagtgccaaagtggtctatagcatattgcaaggacagccatatttttcagtggacccagaatcaggcataataaaaactgcattaccagacatgagcagagaaaatagagagcagtaccaggttgttatacaggccaaagacatgggtggccagatgggaggcctttctggaaccaccacagtgaacatcacgctgacagatgtcaacaacaaccctcctcgatttccccagagtacgtatcaatttaattctcctgagtctgtacctcttggaactcatcttggaaggataaaagccaatgaccctgacgtgggggaaaatgcagaaatggagtatagcattgctgaaggagatggtgcagacatgttcgatgtcatcactgacaaggatacacaggaagggattataactgtcaaacagaatttagatttnc

SEQ ID NO: 185 - DNA, 1141 bp, Homo sapiens
  SITE (32): n equals a,t,g, or c
  SITE (1063): n equals a,t,g, or c
  SITE (1076): n equals a,t,g, or c
  SITE (1084): n equals a,t,g, or c
  SITE (1114): n equals a,t,g, or c
  SITE (1122): n equals a,t,g, or c
ttcacttttgatgtcaaagccactgatggagnacaaccactcgtttcctctactgcaaaagtaactatcaacgtcatggatgtcaatgacaccagcccagttgtcatttctccaccgtctaatacttcctttaagttggtgcccctctcagccattcctggctccgtggtagcagaagtttttgcagtggatgttgacactggaatgaacgctgaactaaagtatactatagtgagtggaaacaataaaggcttatyccggattgatccagtaacaggtaacattactctggaagaaaaaccagcacctactgatgtgggattgcatcgtttggtggtcaacataagtgacctggggtaccctaagtctttgcacacgcttgtgcttgtattcctttatgttaacgacactgctggaaatgcctcctatatctatgacttgatccgcaggactatggagaccccgttggacaggaacataggggatagtagccaaccctatcaaaatgaggactatctaaccatcatgattgccatcatcgccggtgccatggtggtcattgttgtgatcttcgtcaccgttctggtgcgctgtcgccatgcatcaaggttcaaagcagctcagaggagcaagcaaggtgccgaatggatgtccccaaaccaggagaacaagcaaaacaaraaaaagaaaagaaagaaaaggaagtctcccaaaagctctcttttgaactttgttactatcgaagagtccaaacccgatgrtgcagttcatgaacctatcaatgggacaataagcctgccggctgaactggaggrgcaaagtataggaagatttgactggggcccggcacctccaacaacattcaagcctaacagtcctgacctggccaagcactacaaatctgcttctccacagcctgsttttcatctcaaaccagacactccagtttccgtgaaaaagcaccacgtgattcaggaactccctttggacaacacctttgttgggggttgtgacaccctttctaaacgctcttccactagttcagtcattcagtgcctcagantgcaatttccaangaggcttnaagacaaagggccccttacacaccagacangtaaaacnagccacttttactggtcta

SEQ ID NO: 186 - DNA, 704 bp, Homo sapiens
  SITE (640): n equals a,t,g, or c
  SITE (646): n equals a,t,g, or c
  SITE (681): n equals a,t,g, or c
  SITE (694): n equals a,t,g, or c
ggagcgttgtctggaacaacaagtgtattaattaaactttcagatgttaatgacaataagcctatatttaaagaaagtttataccgcttgactgtctctgaatctgcacccactgggacttctataggaacaatcatggcatatgataatgacataggagagaatgcagaaatggattacagcattgaagaggatgattcgcaaacatttgacattattactaatcatgaaactcaagaaggaatagttatattaaaaaagaaagtggattttgagcaccagaaccactacggtattagagcaaaagttaaaaaccatcatgttcctgagcagctcatgaagtaccacactgaggcttccaccactttcattaagatccaggtggaagatgttgatgagcctcctcttttcctccttccatattatgtatttgaagtttttgaagaaaccccacagggatcatttgtaggcgtggtgtctgccacagacccagacaataggaaatctcctatcaggtattctattactaggagcaaagtgttcaatatcaatgataatggtacaatcactacaagtaactcactggatcgtgaaatcagtgcttggtacaacctaagtattacagccacagaaaaatacnatatanaacagatctcttcgatcccactgtaatgtgcaagntcttaacatcaanggatcatgct

SEQ ID NO: 187 - DNA, 802 bp, Homo sapiens
  SITE (742): n equals a,t,g, or c
  SITE (759): n equals a,t,g, or c
  SITE (763): n equals a,t,g, or c
  SITE (775): n equals a,t,g, or c
  SITE (781): n equals a,t,g, or c
ttttttttttttttttttttttttaaataaaggaaacaatacttcatggaataattcatgaaaatttctctgactatacattttcaattttcatgtcaatatgatagaaatgtaaatgttatctcgatttgtacatttctatttgacttgcaaatttttgctcctttaaattttctcgtttggtatttttactctttcctaagtaaataatgatataatcgcataaggatcgactacatcttgtgtcctctcatctacttttaatatcttcctaaattattttacttcaaatctggttgtattgatgcctgtgagctgattgtttacatttctccccacatctctgttcaatgacagcatgtaggtagcttaaaataaccatggagtatttactccagggaaatcagaaaactccatagactagggctttccccgccatagagccagggcacaaaactctttaagactaccattgggttcgaatacacattagcacttttaaaaattttgatggtaaaaagccctaattatttgactgcactgcagaaccaaacatgcatgctaatcttttaaagcgaggtcccaactcattaaggtaatcatagctttcatcctgatcagagactgctgattctaaggagctcagggatccagctaatgamcctgttccctcaaaagcgtaggtctggagggaatcaaaaggaggggcacacggatcagtattagcttcttcgagcttttnccagaatgaattttccngaanatggcactgtcnggggcnacttgcaaagactgcctggta

SEQ ID NO: 188 - DNA, 767 bp, Homo sapiens
  SITE (704): n equals a,t,g, or c
  SITE (730): n equals a,t,g, or c
  SITE (763): n equals a,t,g, or c
actatagaaggtacgcctgcmggtaccggtccggaattcccgggtcgacccacgcgtccgctctgcagctcctggccagctgattcaggtcatccgggccctggacagagatgaagttggcaacagtagccatgtctcctttcaaggtcctctgggccctgatgccaactttactgtccaggacaaccgagatggctccgccagcctgctgctgccctcccgccctgctccaccccgccatgccccctacttggttcccatagaactgtgggactgggggcagccggcgctgagcagcactgccacagtgactgttagtgtgtgccgctgccagcctgacggctctgtggcatcctgctggcctgaggctcacctctcagctgctgggctcagcaccggcgccctgcttgccatcatcacctgtgtgggtgccctgcttggtgagtcaggccacagtggtacatagctgtgcgatctgggcctgcaggggtgtggagaagaaccaggcctctggacacagggaaatccaccttagggcttgaacgaccctcatacctggattttcccaccacctgatgcatccaagagaaaagctctggccttatcagtgacctgccaatccataatgacaatgacaagccatacaatggtttactgagcccctactctgtgccaagtatagsgctgggcacgccacttggganattcattttattatggcaacaacccnttaaagtaaaatatattttccctattcttcacntaac

SEQ ID NO: 189 - DNA, 686 bp, Homo sapiens
  SITE (171): n equals a,t,g, or c
  SITE (677): n equals a,t,g, or c
ggggattcaggctgtggctaatgtgctggaagcacgcacagttgtraccatcaagtatgcaggaagcaatcattctcctggctctcctgggtgccatgtcagggggagaagcactacacctaatcctcttacctgctacaggcaatgtggcagagaattctccacctgggnacttcagtgcacaagttttctgtgaagttatcagcatcattgtcacctgtgatcccaggatttccccagatagtcaactcaaatcccctcactgaagcttttagggtgaattggctgtcaggcacctactttgaggttgtcaccactgggatggaacaactagattttgaaacaggaccaaacatatttgatttgcagatttatgtgaaggatgaggttggtgtcacagacctgcaatcctgactgtccaggtaacagatktgaacsagccactcagtttcaaaggcaacttggcagaaggtaggatacaccaggatgtgcactgcagcccagacagtggcatcagggagggccctgggggacagagagaaacagaaaaagtaaataaacaagcagctgtttccctggaaaaggcagctgcttaatgagcagggaataaatgaaatgtcctccagctcaacactcccaataataatgtccaacagtttgcaaagcccttcacaggnagggtttct

SEQ ID NO: 190 - DNA, 394 bp, Homo sapiens
catctgccctgagctgtggcggtcgtaacacaaacatccacctttctcacycagcatytccacttggatgtttgacaggtcaaacttaatgtgcttctgaaccaaactcctggcttcctctccaccctccacccccacccaaatctgcttctcctatatctttcccattttggttagcagtaactccatccttcctgttgcttggaccaagccttgagtcatccttgactcctctctctttcacacttgacatgaaatcctttaggaaatcttgccagcttctaaatatacccagaacctggccccaccctagtgtctgcatcactaccaccatggtccaagccactcatcccatctcacctggattgttgcaatggctggsarmtgkcctccg

SEQ ID NO: 191 - DNA, 692 bp, Homo sapiens
  SITE (550): n equals a,t,g, or c
  SITE (659): n equals a,t,g, or c
  SITE (669): n equals a,t,g, or c
  SITE (678): n equals a,t,g, or c
gtaaccgacttactatagggaaagctggtacgcctgcaggtaccggtccggaattcccgggtcgacccacgcgtccgaatcttactgttattgctgctgaaatcaacaatcccaaagagacaacacgcgtggctgtttttgtgagaattttggatgttaatgacaatgccccacagtttgctgtgttctatgacacttttgtatgtgaaaatgccagaccagggcagctaatacagactataagtgcagtagacaaagatgaccctttaggtggacagaaattttttttcagtttagctgctgtcaatccaaacttcacagtacaggataatgaagataatactgccagaatcttaaccagaaaaaatggattcaatagacatgaaatcagtacctatctcttgcctgtggtgatatcagacaatgattacccaattcagagcagcacaggcacactgaccattcgagtgtgtgcttgtgacagccaaggcaacatgcaatcctgcagtgctgaagccctgctcctccctgccggcctcagcactggggnccttgatcgccatcctcctctggcatcatcattctactggttatagwagtactgktttgsagytytaaagacaggcgaaaaaragcctttmttgkcaaagaagatwtcnggggacaacntgtggaggntttaacggtggagt

SEQ ID NO: 192 - DNA, 1018 bp, Homo sapiens
  SITE (931): n equals a,t,g, or c
  SITE (994): n equals a,t,g, or c
  SITE (1005): n equals a,t,g, or c
ggctgtatgctacagatgccgacagcgaggagagaggccaagtttcatattttctgggacctgatgctccatcatatttttccttagacagtgtcacaggaattctgacagtttctactcagctggaccgagaagagaaagaaaagtacagatacactgtcagagctgttgactgtgggaagccacccagagaatcagtagccactgtggccctcacagtgttggataaaaatgacaacagtcctcggtttatcaacaaggacttcagcttttttgtgcctgaaaactttccaggctatggtgagattggagtaattagtgtaacagatgctgacgctggacgaaatggatgggtcgccctctctgtggtgaaccagagtgatatttttgtcatagatacaggaaagggtatgctgagggctaaagtctctttggacagagagcagcaaagctcctatactttgtgggttgaagctgttgatgggggtgagcctgccctctcctctacagcaaaaatcacaattctccttctagatatcaatgacaaccctcctcttgttttgtttcctcagtctaatatgtcttatctgttagtactgccttctactctgccaggctccccggttacagaagtctatgctgtcgacaaagacacaggcatgaatgctgtcatagcttacagcatcatagggagaagaggtcctaggcctgagtccttcaggattgaccctaaaactggcaacattactttggaagaggcattgctgcagacagattatgggctccatcgcttactggtgaaagtgagtgatcatggttatcccgagcctctccactccacagtcatggtgaacctatttgttcaatgacactgtcagtaattgaggagttacattgaggagtcttttaaggaaaagaaccagaggtttantwtagggggggaaagaaccacaattcttcaataggaaccgactcataggggagggtaggattntgtgtcttgtnttgcccaccttag

SEQ ID NO: 193 - DNA, 1220 bp, Homo sapiens
  SITE (12): n equals a,t,g, or c
  SITE (16): n equals a,t,g, or c
  SITE (22): n equals a,t,g, or c
  SITE (1063): n equals a,t,g, or c
  SITE (1124): n equals a,t,g, or c
  SITE (1164): n equals a,t,g, or c
  SITE (1171): n equals a,t,g, or c
  SITE (1215): n equals a,t,g, or c
ttacaggacccngctnggaacngtaggtgacactatagaaggtacgcctgcaggtaccggtccggaattcccgggtcgacccacgcgtccgctgccattgactttgaaaagtccaaagtattaaccttcaagctcctggctgttgaagtgaacaccccagagaagttcagttccacagcggatgttgtgatccagctcctggacaccaatgacaatgtccccaagttcgactccctctactacgttgccaggattcctgagaacgccccagggggctccagcgtggtggctgtcacagctgtggatccagatacaggaccctggggcgaagtgaaatattccacctatgggactggggcagacctcttcctgatccacccatccactgggcttatctacacccagccctgggctagcctggacgctgaggccactgccaggtacaacttctatgtgaaggcagaggacatggagggcaagtacagcgtagctgaggtgtttatcacactgctggatgtcaatgaccacccccctcagtttggaaagagcgttcagaagaagacgatggtgctagggaccccagtgaaaattgaggccatagacgaggatgcagaggaacccaacaacctggtggactattccatcacccatgcagagcccgccaacgtgttcgacatcaattcccacacgggggagatctggctcaagaattscatccgstccctggatgccctgcacaacatcacacctggaarggactgsctatggtccctagaggtgmaggccaaggaccggggctycccatccttyagcaccacagccttactcaagattgacatcacagatgctgaggtgagtacaaagccatggtcaggaaaaaggggtcagcaggccagctcagacctctctgcaacgtgggcagagcgagaaggaccatctccaggcttcctccaaaagacactcaacgttatcaaaggcagcctgtgccatcaaacacacagtctttggaagcgggttgagtttctagttcaatacttattaatggtgtgactttgggctttgntaagcctctgttacctttcctgtaagatgggataaggatgcctccttcacacgggtgttgnaaagcagagtgaagtcattatgtgtagctctcagctcagngtcttgnagaaactagtcacttaagagatcctgatacatcttggaagtggnccccc

SEQ ID NO: 194 - DNA, 2775 bp, Homo sapiens
  SITE (2): n equals a,t,g, or c
  SITE (2761): n equals a,t,g, or c
anaggggggattggggaccgggcccccccttttttttttttttttttttgcttttcagaagaaacgttttattatttttttgtcgaagaaaaaaagccatataaatattagagtataaaacttgcgtgagacacaggaagagggtggggtgggagctacgtgactatgcgaagagaagcgcttataggagaagtcagtacgggggagggggtcgccttagcgcgtggacacagcacaaaacacaacacgggccgccgcgggcagatcaaggacagacggctgcgcggagcccgccgcccgctgcccacccgccatcacgtaaaagcacaccgcactacactactggctattctacaccagccgaaagagggagggggcgctacactactgtaagggcaggtctggggttctctggcagccccgctggatggccggggacccaggggcagaagggggtgggagaagaaggtctatgcacaaggaggcactggggaactttaaccaggctatggccactagggggcgcactggggacctgggcagtggccttcacggaagagaaacggcacctggcaaggtgaaggactgaggcttcaggagggcaggggccctgttgaagaagccccatcctgggctgagactttctgttcatttggtccctgccctagctccctgcctccccaacccagggactaagaatggcctggctggcccacccttcctgctggggctccgctgacccttccaccagtggcacctctggagtacccagcacccacagaggcccctctgacctctcaaggggacctggtcctaaacctgcttcgagcttccttggactgaaatgccagtttaatccattggtcctgttagctcagcccaaagctggctgcctgggctgagccctattatgtagtgggaagggtccagcctagttattggtttatggctggaatctggaggatgttgtcagtcccctgaggacatacagagcctcctccaaggccttgataacttgatgtgtcaagctttgtccatgcccccaccatccacatccacacacttcccttccttatcttaccaccccatactgtcttggaacatgcagtggagtctcttgtttgaggaggaggtgggggaagtcaaggcatgcagtggaaacgtcaaacaatgaaaaacaaaacagaagactggtccccagggcgttgggaagaggcttggtagcaaaatgccctccctaaatccagcaagcatcagtaccatggggatggtgatcatgtcctccaaaacttgagcattgatcttgggctctggaaggaggtgaaggggctggcaccaaaccatgctttgggggaagattgagaatcaaaggagaggccaagaggtcatgatgcccttccaacttttcagaactaggaggcttgtaggttacttggtacttcaacaccccaaccaccttactcgggaaagaggaactgttggagtggggtggggaggagggaggcatgggatggatgggcctgattgatttggaagatggaggagttcagctgtaactaaacggggtgtggcaaatggttcttggtgtctacagtaaccccactacccccatgggtacagcagttgattggatgggggttcccagcggaactgcttttgcatattcaamcccctgggggggaaggggtaggtgctgactgggcacttgtttctgtttcccaaggggagcatggccttggcccctaccagtattctgggggttagccctgaaactctgaggcctgggtgcaggtaaggagaagctgggctggttggggagaggccgccctgtggctcttggcctggcctccatgttacttcttctccttcttgcccgacttcttcttgttgccattgccacctgctggggccttgccatcccgcttgccagctgcgttggtcagtgtggcattgctgcctgggatgtagacattctggcggtagtcgggcacgtgctgcagggtgaactggggtccgtagcgggcgctcaatcccatggtgccggcaccccctcccagggtggagctcccatcagcagcttcactggcggacgccaagatcatggcttgcagcatctctgtgtcaaactggttgttgggccaggtgccggtgtcatcgccattttgggagccgctggtgccgggtctctgggcctgagagaaacgccagtccgtgttgggcggggcttgcgaagtcagagtctcaggatgtgaagtcaaatcctccccaccatgaggtggaattaaggctccaggagaaacactgcaaaccatgtcttcattggaatgtaggggcacactgcattttaggaaattaaactcttttgtacccgtatgtgcaatgcacagattataagaataaggcaaagtcccctcactgtagttggggggaactacaggtccagayttgacacagagaccaggatggaagcagtcccaagtagcagggctgagagagcgtcgcaggcgcaaggcaatggccagaatcacggcgaggaggaagagcactgagattaaggccaaggccaccaccaggtaaaactgcagttcagcctgggggtcagagagtacagggcggtcgctgaggtctggcagtatctcttgcaagttgtctgcgaagaccagatgaagcgtggcggtggcagagagtggcggctgtccaccgtcacgcacagcgaccagcaggcgctggcgggctgcgtccctgtcgcctaaggctcganccgtgcgcacctcc

SEQ ID NO: 195 - DNA, 712 bp, Homo sapiens
  SITE (16): n equals a,t,g, or c
  SITE (667): n equals a,t,g, or c
  SITE (676): n equals a,t,g, or c
  SITE (689): n equals a,t,g, or c
gtttaaggtacccctnccggtaccggtccggaattcccgggtcgacccacgcgtccgccctttcgatkgcttcagtgttgaccccaacaatgggaccctgttcacaatagtgggaacagtggccttgggccatgacgggtcaggagcagtggatgtggtgctggaagcacgagaccacggggctccaggccgggcagcacgagccacagtgcacgtgcagctgcaggaccagaacgaccacgccccgagcttcacattgtcacactaccgtgtggctgtgactgaagacctgccccctggctccactctgctcaccctggaggctacagatgctgatggaagccgcagccatgccgctgtggactacagcatcatcagtggcaactggggccgagtcttccagctggaacccaggctggctgaggctggggagagtgctggaccaggcccccgggcactgggctgcctggtgttgcttgaacctctagatttgaaagcctgacacagtacaatctaacagtggctgcagctgaccgtggggcagccaccccaaagctcagtcgtccagtcactgtcactgtactagatgtcaatgacaacccamctgctttacccgagcatyctamcgtgtgacagtacctgaggacacacctgttgggagctgaanttggttgcntgtagaggccctntgacgcttgacccctgggccctt

SEQ ID NO: 196 - DNA, 508 bp, Homo sapiens
  SITE (304): n equals a,t,g, or c
  SITE (420): n equals a,t,g, or c
ggccagatctccgcggctgacctggactccyctgccagcccaatcagatactccatcctcccccactcagatccggagcgttgcttctctatccagcccgaggaaggcaccatccatacagcagcacccctggatcgcgaggctcgcgcctggcacaacctcactgtgctggctacagagctcgacagttctgcacaggcctcgcgcgtgcaagtggccatccagaccctggataagaatgacaatgctccccagctggctgarccctacgatacttttgggggggaatttkgaaagttctggncagcttgattaagtcatccgggccctggacagggatgaagttggcaacagtagcatgtctctttcaaggtcctctggccctgagccaactttactgtccaggacaaccgagatggntccgccagcctgctgctgcccttccgccctgctccaccccgccatgccccctacttggttcccatagaactgtgggactgggggcaag

SEQ ID NO: 197 - DNA, 623 bp, Homo sapiens
tttttgtttttttttttttttttacaaaataaagtgtttgtttattatgaaattagagatggaggcccctccccttcctccctctttccccttccccagccgcctccccctttcctttccctactccctcaggaagcacacaagacaatgcccagggctgggatgcccaggggaagctgrcagctgggcagagctccagggaggcggccacacgggaggctggagctcttgccctgggaggcaggctggttccctctctcagctggaggccagtggagccaggatgaggctgaggccatgagtaatggatggaaccatgcaggcaggtctggggcacaacatcccctgcaggagggtgggcagcagtggctggaagtttctcttgattttgggatggacaacagaaaaaaacaaaaagccagtcacagggacccagagagaaggaagggagatgtgggcaggagacagacacagagcatgtgtatgggcaaggaagacgcagggagactatgtgtgagcttcagaactgcagagacaaaacgccacggaggaaggagaggaatcacagtgagagatcgcaggccagggccagggcaggaaacccaggcccggacagaggagcc

SEQ ID NO: 198 - DNA, 988 bp, Homo sapiens
  SITE (974): n equals a,t,g, or c
  SITE (983): n equals a,t,g, or c
ggttgaaatgcttttctgctagactggcaacatgttttgattcttctcaaataactcgcaagctcttgtgaagcacaacggcctaccttgtcctgaagaaaacatactctaaggcccacagatgattaaacccagccatttatgtgacaatagcatttttatttttcttatcaagatctgggtatttgatccacacaatggtaaagattcccatgttagccaagatctaaatgattcaaactgatgatactctctgcagaagaggtgactataaacgcagcccctgtgatgccaactggacatattatggagatagctgctatgggttcttcaaacacaacttgacatggaaagagagtgagcagtactgcactgacatgaaggctactctcctgaagactgacaaccagaacattctgtggatagaagtcaagggctccaatgtctcccaagacgaaagaatcccaagtctcatttggaggaatgctatcactaactaggattcctggagctaaaacattatgagcatgctgtcttgtgatggtgatttcatgtgttttctgcatgggattattaacggcatccattttcttgggcgtcaagtgtgtccaccattgcgatgcagcagcaagaaaaactcatccaacaagagagggcactgctaaactttacagaatggaagagaagctgtgcccttcagatgaaatattgccaagccttcatgcaaaactcattaagttcagcccataacagcagtccttgtccaaacaattggattcagaacagagaaagttgttactatgtctctgaaatttggagcatttggcacaccagtcaagagaattgtttaaaggaaggttccacgctgctacaaatagagagcaaagaagaaatggattttatcactggcagcttgaggaagattaaaggaagctatgattactgggtggggttgtctcaggaggacacagcgnacgcagttngcaaa

SEQ ID NO: 199 - DNA, 1091 bp, Homo sapiens
gcggacgcgtgggcggacgcgtgggcggaaatcacttatgctgaagtgaggttcaaaaatgaattcaagtcctcaggcatcaacacagcctcttctgcagcttccaaggagaggactgcccctctcaaaagtaataccggattccccaagctgctttgtgcctcactgttgatatttttcctgctattggcaatctcattctttattgcttttgtcattttctttcaaaaatattctcagcttcttgaaaaaaagactacaaaagagctggttcatacaacattggagtgtgtgaaaaaaaatatgcccgtggaagagacagcctggagctgttgcccaaagaattggaagtcatttagttccaactgctactttatttctactgaatcagcatcttggcaagacagtgagaaggactgtgctagaatggaggctcacctgctggtgataaacactcaagaagagcaggatttcatcttccagaatctgcaagaagaatctgcttattttgtggggctctcagatccagaaggtcagcgacattggcaatgggttgatcagacaccatacaatgaaagttccacattctggcatccacgtgagcccagtgatcccaatgagcgctgcgttgtgctaaattttcgtaaatcacccaaaagatggggctggaatgatgttaattgtcttggtcctcaaaggtcagtttgtgagatgatgaagatccacttatgaactgaacattctccatgaacaggtggttggattggtatctgtcattgtagggatagataataagctcttcttattcatgtgtaagggaggtccatagaatttaggtggtctgtcaactattctacttatgagagaattggtctgtacattgactgattcactttttcataaagtgagcatttattgagcattttttcatgtgccagagcctgtactggaggcccccattgtgcacacagggagagaacatgagtctctcttaatttttatctggttgctaaagaattatttaccaataaaattatatgatgtggtgtaaaaagggggggcccgtacccaattaccctatagtgagataa

SEQ ID NO: 200 - DNA, 451 bp, Homo sapiens
  SITE (28): n equals a,t,g, or c
  SITE (433): n equals a,t,g, or c
  SITE (445): n equals a,t,g, or c
tcacctgcaggtaccgggtccggaattnccgggtcgacccacgcgtccggaagattttaatgtattctcatctgtaaaatcatatccctgtagttcgaattgacaatgaaatataaaaatggcaactaattggttatttcataagtgtccttaagatgaatggtgttcacactaaaagagtgaattggtatgctatgaacctcatggtactaatcttttatttccaggggttctttccagcccttgtcctcctaattggattatatatgagaagagctgttatctattcagcatgtcactaaattcctgggrtggragtaaaagacaatgctggcaactgggctctaatctcctaaagrtagacagctcmaatgaatgagtctcactctgttggcccagctagagtgcagtgaagccgcgacatcccagggcncaagtggatccncccacc

SEQ ID NO: 201 - DNA, 475 bp, Homo sapiens
  SITE (445): n equals a,t,g, or c
  SITE (466): n equals a,t,g, or c
  SITE (470): n equals a,t,g, or c
  SITE (474): n equals a,t,g, or c
gaaagaacccaaagtcagcttctccagatggtcctgcaagctggaagttcaatggtggaagcttatattatttttctagtgtcaagaagtcttggcatgaggctgagcagttctgcgtgtcccagggagcccatctggcatctgtggcctccaaggrggagcaggcatttctggtagagttcacaagtaaagtgtactactggrtcggtctcactgacaggggcacagagggctcctggcgctggacagatgggacaccattcaacgccgcccagaacaaagcgtgagtctagccaccatctggcgctgtcccaggcactgtctttggtggacctagctacacactgtgtgtcccttcccagtaagtggtagtgttgtgtgtatatgtgtgtgtgacgtgtgtggtgtgtatgtggtgtatgtgtggtgtgtgtgccatgtatgnggcatgtgtaatgcatgtggngtcnaggng

SEQ ID NO: 202 - DNA, 431 bp, Homo sapiens
  SITE (411): n equals a,t,g, or c
  SITE (414): n equals a,t,g, or c
  SITE (420): n equals a,t,g, or c
caagaagagctgggtccaggcccagggggcttcccaggtagctgggggcccagctgttgagcctggccagctacgaggaggagcactttgtggccaacatgctcaacaagatcttcggtgaatcagaacccgagatccacgagcagcactggttctggatcggcctgaaccgtcgggatcccagaggggtkcagagttggcgctggagsgacggcktagggttctcttaccacaatttcgaccggagccggcacgacgacgacgacatccgaggctgtgcggtgctggacctggcctccctgcatgggtgggccatgcatgcgacacacagytggamtggatytgcaaatccccagagttaagggactttcgggaacccgacgacagccttcaaggcgacgggaatggctncgnttccangaaggcgatta

SEQ ID NO: 203 - DNA, 634 bp, Homo sapiens
  SITE (531): n equals a,t,g, or c
  SITE (571): n equals a,t,g, or c
gcacaagaggagttacttgttccagcctcctgtgtggactgctttcctatcaaagcaccttagacatgcacgaggaagaaatatacacctctcttcagtgggatagcccagcaccagacacttaccagaaatgtctgtcttccaacaaatgttcaggagcatgctgtcttgtgatggtgatttcatgtgttttctgcatgggattattaacagcatccattttcttgggcgtcaagttgttgcaggtgtccaccattgcgatgcagcagcaagaaaaactcatccaacaagagagggcactgctaaactttacagaatggaagagaagctgtgcccttcagatgaaatattgccaagccttcatgcaaaactcattaagttcagcccataacagcagtccttgtccaaacaattggattcagaacagagaaagttgttactatgtcyctgaaatttggagcatttggcacaccagtcaagagaattgtttaaaggaaggttccacgctgctacaaatagagagcaaagaanaaatggtaaacactgttttgtggtctcatgttattctganaatatcattttacttattaaaagaaatccctcattctcataagaaaaaattccttaatattct

SEQ ID NO: 204 - DNA, 718 bp, Homo sapiens
  SITE (143): n equals a,t,g, or c
  SITE (648): n equals a,t,g, or c
  SITE (705): n equals a,t,g, or c
  SITE (717): n equals a,t,g, or c
  SITE (718): n equals a,t,g, or c
gcagccctcaaggccgacgggaatggctgcgcttccaggaggccgagtacaagttctttgagcaccactccacgtgggcgcaggcgcacgcatctgcacgtggttccaggccgagctgacctccgtgcacagccaggcggagntagacttcctgagccacaacttgcagaagttctcccgggcccaggagcagcactggtggatyggcctgcacacctctgagagcgatgggcgyttyaratggacagatggttccattataaacttcatctcctgggmaccaggcaaacctcggcctgtcggcaaggacaagaagtgcgtgtacatgacagccagccgagaggactggggggaccagaggtgcctgacagccttgccctacatctgcaagcgcagcaacgtcaccaaagaaacgcagcccccagacctgccaactacagccctkggkggctgccctctgactggatccagttcctcaacaagtgttttcaggtccagggccaggaaccccagagccgggtgaagtggtcagaggcacagttctcctgtgaacagcaagaggcccagctggtcaccatcacaaaccccttagagcaagcattcatcacagccagcctgcccaatgtgacctttgacctttggattggnctccatgcctcgcagagggacttccagtgggtggagcaggagctttgatgtatgccnactgggcactgnn

SEQ ID NO: 205 - DNA, 1101 bp, Homo sapiens
  SITE (58): n equals a,t,g, or c
  SITE (159): n equals a,t,g, or c
  SITE (250): n equals a,t,g, or c
gcggccgccctttttttttttttttaagaaaacattcaggatgtttattgtagctgantgaagagtagcaaaagcctggaaacaaagttaattctctttgacaaaagggtaaaaaatgtataaacccacattataattcaaccattagaaatataaganattttgtttaggaccttattaagaatttaaaacgcaagatacagaaaaacaggcataatttgatcacatttggcataaaattagcgacganttaaaatccctggttttkwtytywtgaagtcacattggtttatactatcacgtaaaaattttgaagtgtacattttagtttgttaacaggggttactctgaggctagaccagtgtcgatgatggagggagaagggagaagagattttggcatttaattgcactttaaaatcttacacctggagattaatattagaaactaataggccaaaaatagtgatcattgattatttcactgtgaattttgtcaaactctaatactgacaaatccatttgaaaacactgctgcaggtttcagagaaaattttgctttccttaatggcagcacagctgttttctttagctggtccctttatgaagaatatctttgaatctattggagaaccatccacccaagtccatgtcattttcaaggaggtaaagttaagcccaatccatacgtagtttaattgtcttaggtttttctgtataaaagccatttcaagttggtcatgtatgattagtagatgagattttctttccaaacaatacacataactgtcactccagcttttcatctcattagagaaccaataacacttcccttggtatttgagccattctgattggcatagtactgtctggtctgcagatctcgaagcacaaaggtccttattacttatatttcttcttgtgccattattcacttttagatctccagtgtcctcatactgagtggcatttgaacaacttcctttttggcattttagcaatactccctgagaaaccaacaggatcaaggagatcaaagtcaaagtgagaataccattcacggttccagatattcccagtaagattttataccagtgcaacc

SEQ ID NO: 206 - DNA, 493 bp, Homo sapiens
  SITE (433): n equals a,t,g, or c
  SITE (451): n equals a,t,g, or c
  SITE (474): n equals a,t,g, or c
  SITE (475): n equals a,t,g, or c
ggttctgcccaaacatctcaacttacatttaaagattattcagtgacgttgcactggtataaaatcttactgggaatatctggaaccgtgaatggtattctcactttgactttgatctccttgatcctgttggtttctcagggagtattgctaaaatgccaaaaaggaagttgctaaaagtgaataatggcacaagaagaaatataagtaataaggacctttgtgcttcgagatctgcagaccagacagtactatgccaatcagaatggctcaaataccaagggaagtgktawtggktctctaatgagatgaaaagctggagtgacagttatgtgtattgtttggaaagaaaatctcatctactaatcatacatgaccaacttgaaatggcttttatacagaaaaacctaagacaattaaactacgtatggantgggcttaactttacctncttgaaaatgacatggacttggnnggatgggtcttcaataga

SEQ ID NO: 207 - DNA, 415 bp, Homo sapiens
  SITE (323): n equals a,t,g, or c
  SITE (393): n equals a,t,g, or c
  SITE (394): n equals a,t,g, or c
  SITE (395): n equals a,t,g, or c
ggcacgagcagacactgctccttgggtagccataactgtgtccccactttccagggtgccagacctacatggacatcgtcattgtcctggatggctccaacagcatctacccctgggtggaggttcagcacttcctcatcaacatcctgaaaaagttttacattggcccagggcagatccaggttggagttgtgcagtatggcgaagatgtggtgcatgagtttcacctcaatgactacaggtctgtaaaagatgtggtggaagctgccagccacattgagcagagaggaggaacagagacccggacggcatttggcattgantttgcacggttaaaaaaaaagtagaacaaaaaaattttttttagatctcagatgctattgttagttatcnnnttgccttttaacacattacc

SEQ ID NO: 208 - DNA, 780 bp, Homo sapiens
  SITE (728): n equals a,t,g, or c
  SITE (776): n equals a,t,g, or c
acgtcagatttgactgcattctttccactccattgatgactaacactccataagaagaccccatcctcacagaacctacttcttatagagtgtctgtggcagaagctatttttcaaagttggctgcaacaatattccccattctaaatgctcttctgcaaaatgacctcgctgttcatccatcaagggcagaaccaaattcccttccccttgaatctggcctgggctcagtcacttgcccaaccaatagaatgtggcagaagtcatattctgggacttcgagactaggttataggcagtctcccargtcctgcctgggcctcttgggatgctcactcttgggacgctgtctctaaaactcctgttgccatgccacaaggaaatcaagccacatggctacgtgtgggtgctcaggtcaccagtcccacctgagctctcagccaacagccaacaacaactgacagccacgtgagaaccttcagatgacaacagcccaaggtgacaccagactgcaactacctgagaggacccaagagaaaaccgaccagctgagcccagtcaaactccagaattttgaggaattaagaaattattgtctcaaggtactaaattttgtggtagtgtgttacaaggcaatagataactacaatagcatctgagatctaaaaaaattttttttgttctactttttttttaccgtgcaaattcaatgccaaatgccgtccgggnctctgttcctcctctctgctcaatgtggctgcagcttccaccacactnttac

SEQ ID NO: 209 - DNA, 1488 bp, Homo sapiens
  SITE (1461): n equals a,t,g, or c
  SITE (1467): n equals a,t,g, or c
  SITE (1473): n equals a,t,g, or c
  SITE (1482): n equals a,t,g, or c
cccagacagaagagaccacggtaaagatcagctgacggcctctgtgggaacaaagacagggaaaggggaaatgagttcaccagaaaccaacaggcagcacaggaggtggtaaacccgaaaaagaaaatgaagaaaaagaaatacgtgaattctggcacagtcaccctgctttcctttgctgtggagtcagagtgcaccttccttgactacatcaaaggagggacccagatcaacttcactgtggccattgatttcactgcctccaatgggaacccctcacagtccacatccctgcactacatgagcccctaccagctgaacgcctacgcgctggcgctgactgccgtcggagagatcatccagcactacgacagtgacaagatgttccctgccctgggcttcggggccaagctgcccccggatggcagagtgtcccacgagttcccactgaatggcaaccaggagaacccctcatgctgcggcatcgacggcatcctggaggcctaccaccgcagcctgcgcactgtgcagcygtacggccccaccaactttgcccccgtggtcacccacgtggccaggaatgcagcggccgtgcaggatggctcccagtactcggtgctgctcatcattactgatggggtcatctcggacatggcgcagaccaaggaggccattgtcaacgctgccaagctccccatgtccatcattatcgtcggcgtgggccaggcagagttcgacgccatggtggagytggatggcgacgamgtgcggatctcctcccgggggaagctggctgaacgcgacatcgtccagtttgtacccttccgggactacgtggaccgcacaggcaaccacgtgctgagcatggcccgcctggcccgagacgtgctggcagagatccctgaccatcaaggtggaggtgtatgactgggatcgggacggcagccatgacttcattggggagttcaccaccagttaccgggagctggcccgtgggcagagccaattcaacatctatrargtggtaaacccgaaaaagaaaatgaagaaaaagaaatacgtgaattctggcacakkcaccctgctttcctttgctgtggagtcagagtgcaccttccttgactacatcaaaggagggacccagatcaacttcactgtggccattgatttcactgcctccaatgggaacccctcacagtccacatccctgcactacatgagcccctaccagctgaacgcctacgcgctggcgctgactgccgtcggagagatcatccagcactacgacagtgacaagatgttccctgccctgggcttcggrgccaagctgccccggatggcagagtgcccacgagttcccactgaatggcaaccaggagaacccctcatgctgcggcatcgacggcatcctggaggcctacaccggagctggcactgtgcactgtcggcccaccaaaattntccccnggggancccaagggnccagaa

SEQ ID NO: 210 - DNA, 462 bp, Homo sapiens
  SITE (455): n equals a,t,g, or c
cagatcctggtaagtcaggcagggaatgaggtgtggaccaaagtgttgagtactctggggttctcagggccatcacaagggcagaacaccaggttcaagcttctttcttcctagaaatgcccggaggctgagtgtttcaggctgcgctgtgagctcgggcccctgcaccaacaagagagccaaagtctgcagttgcatttccgagtctgggccaagactttcttgcagcgggagcaccagccatttagcctgcagtgtgaggctgtgtacaaagccctgaagatgccctaccgaatcctgcctcggcagctgccccaaaaagagcgtcaggtggccacagctgtgcaatggaccaaggcagaaggcagctatggcgtcccactgtggatcatcatcctagccatcctgtttggcctcctgctcctaggtctaatcatctacatcctctacaagcntggattg

SEQ ID NO: 211 - DNA, 877 bp, Homo sapiens
  SITE (35): n equals a,t,g, or c
  SITE (56): n equals a,t,g, or c
  SITE (68): n equals a,t,g, or c
acaccaagaagtcccacaaggccactgtgcatgtncgggtcaacgatgtgaacgantttgccccagtntttgtggaacggctgtatcgtgcggctgtgacagaggggaagctgtacgatcgcatcctgcgggtggaagccattgacggtgactgctccccccagtacagccagatctgctactatgagattctcacacccaacacccctttcctcattgacaatgacgggaacattgagaacacagagaagctgcagtacagtggtgagaggctctataagtttacagtgacagcttatgactgtgggaagaagcgggcagcagatgatgctgaggtggagattcaggtgaagcccacctgtaaacccagctggcaaggctggaacaaaaggwtcgaatatgcaccaggtgctgggagcttggctttgttccctggtatccgcctggagacctgtgatgaaccactctggaacattcaggccaccatagagctgcagaccagccatgtggccaagggctgtgaccgtgacaactactcagagcgggcgctgcggaaactctgtggtgctgccactggggargtggatctgttgcccatgcctggccccaatgccaactggacagcaggactctcggtgcactacagccaggacagcagcctgatctactggttcaatggcacccaggctgtgcaggtgcccctgggtggccccagtgggctgggctctgggccccaggacagcctcagtgaccacttcaccctgtccttctggatgaagcatggcgtaactcccaacaagggcaagaaggaagaggaaaccatcgtatgtaacactgtccagaatggtgagcctcccctccaggcactagccagagg

SEQ ID NO: 212 - DNA, 510 bp, Homo sapiens
  SITE (458): n equals a,t,g, or c
  SITE (485): n equals a,t,g, or c
ctttgatcaacagccgctttccaattccatcagcaacagatcctgacacaggcttcaatggtgtacagcattatgaattgttaaatgggcagagtgtttttggactggatatcgtggaaactccagagggagagaagtggccacaactgattgttcagcaaaacttggatagagaacagaaagatacctatgtratgaaaatcaaagtagaggatggaggcactcacagaaatccagtacggccatactgcaggtcacagtaagtgrwtgtgaaatgaacaacaggccagtgtttaaagagggtcaagtggaggtgcatattccagagaatgctcccgtagtgacctctgtaattcagctccatgccactgatggcagatataggcagtaatgctgaaatccggtacatttttggtgcccaggtcgcccctgcaaccaaaagactstttgctttaatnatactattggggtgattacatttcagnggtccttagataggaggagacagcc

SEQ ID NO: 213 - DNA, 301 bp, Homo sapiens
  SITE (277): n equals a,t,g, or c
  SITE (279): n equals a,t,g, or c
  SITE (285): n equals a,t,g, or c
agccaaaatccacaagcgctctgtctcggtgacgtccattacctcgactgtgctgcctcctgtttacaaccaacagaatgaagacacctgcataatccgcatcagtgtggaagacaataacggcaacatgtacaagagcatcatgttgacgagccaggataaaacccccgctgtgatccagagagccatgctgaagcacaatctggactcagaccccgccgaggagtacgagctggtgcaggtcatctyggrggacaaagaacttgtgattccagantnagcaangtcttttatggccatg

SEQ ID NO: 214 - DNA, 443 bp, Homo sapiens
  SITE (381): n equals a,t,g, or c
  SITE (416): n equals a,t,g, or c
  SITE (432): n equals a,t,g, or c
ggaactggaccgggaggaagttgatttctacagctttggggtagaagctcgagaccatggcactccagcactcactgcctcggccagtgtcagcgtgactgtcctggatgtcaacgacaacaatccaacctttacccaaccagagtacacagtgcggctcaatgaggatgcagctgtgggcaccagcgtggtgacggtgtcagctgtggaccgtgatgctcatagtgtcatcacctaccagatcaccagtggcaatactcgaaaccgcttctccatcaccagccaaagtggtggtgggcttggtatcccttgccctgccactggactacaaacttgagcggcagtatgtgttggctggtaccgcctcccatggcactcggnaggacacggcacagattgtggtgaatgtcaccgancgccaacacccatcgncctggctttca

SEQ ID NO: 215 - DNA, 487 bp, Homo sapiens
  SITE (441): n equals a,t,g, or c
cagggctccagtcaggccgatccgctccgctcacggaaggaaaacagaaataacttgctggcttgtctggagtcacatgtacttaggtgacaatttacagaaagtcatctctgcagcttgatgggcgacaacccttttcaaccaaaaagtaattcaaaaatggcagaactgtttatggaatgtgaagaagaggagctggaaccatggcagaagaaagtaaaagaagttgaggatgacgatgatgatgagccaatctttgttggcgagatatcaagttcaaaaccagcaatttcaaatattttgaacagagttaaccccagctcatattcaaggggactaaagaatggtgcactcagtcgaggtattactgctgcattcaagcctacaagtcaacactacacgaatccaacatcaaatccagtgcctgcctcaccaataaanttttcatcctgagkctagatcttcagatagtctgtattgtcagcct

SEQ ID NO: 216 - DNA, 618 bp, Homo sapiens
  SITE (92): n equals a,t,g, or c
  SITE (558): n equals a,t,g, or c
  SITE (577): n equals a,t,g, or c
  SITE (596): n equals a,t,g, or c
  SITE (614): n equals a,t,g, or c
ccaggcctgggaccctgttgggaacttttaatgccatggatccagacagccagataagatatgaactggttcatgacccagcaaattgggtnagcgtcgacaaaaactccggagtggtcatcaccgtggagccaattgaccgagaatcccctcatgtaaataacagtttttatgtaatcatcattcacgctgttgatgatggcttcccaccgcagactgctacagggaccctaatgctcttcctgtctgacatcaatgacaacgtcccgactctccggccacgttcccgctacatggaggtctgtgagtctgctgtgcatgagcccctccacatcgaggcagaggatccggacctggagccgttctctgacccatttacatttgaattggacaatacctggggaaatgcggaggacacatggaagttggggagaaattggggtcaatcagttgaacttttaaccttgagaagcctgccacgtggtaattacttggtgccactcttgcattggagacaaacagggactttcccagaagcaaactgtccatgtaaggatntgcccctgtgccatgggcntcacatgtgtggagcttgncagatgcagaatgggggnttca

SEQ ID NO: 217 - DNA, 1707 bp, Homo sapiens
  SITE (2): n equals a,t,g, or c
  SITE (1419): n equals a,t,g, or c
anacgccmgctcgaattaaccctactaaagggaacaaaagctggagctccaccgcggtggcggccgctctagaactagtggatcccccgggctgcaggaattcggcacgagcgattagtgacaaatgcagctctagaccgggaagaggtattcttgtacaacatcactgtgacagccacggacaaaggaacaccacctctgtctacagaaacaatcatctctctaaatgtggcagacaccaacgacaacccgcccaccttcccccattcatcctactcagtctatgtccttgaaaacaaccccaggggtgcctccatcttctctgtgaatgcactggaccctgacgtggaccagaacgcccaagtctcctactcactggcagaagacaccctccagggggcgcccctgtcctcctacgtgtccatcaactccgacactgggattctgtacgccctgcgctccttcgactatgagcagttgagagacctacagctgtgggtgacagccagcgacagcggggacccgcctcttagcagcaacgtgtcactgagcctgtttgtgctggaccagaatgacaatgcgcccgagatcctgtaccccgccctccccacagacggttccactggcgtggagctggcgccccgctccgcagagcccggctacctggtgaccaaggtggtggcggtggacagagactcgggccagaacgcctggctgtcctaccgcctgctcaaggccagcgagccrggactyttctcrgtgggyctgcacacgggcgaggtgcgcacggcgcgmgccctgctggacagagacgcgctcaagcagagyctmgtggtggccgtccaggaccacggccagccccckctctccgccactgtcacgctcaccgtggccgtggccgacaggatcyccgacatcctggccgacctgggcagcctcgagccctccgccaaacccaacgattcggacctcactctgtacctggtggtggcggtggccgcggtctcctgcgtcttcctggccttcgtcatcgtgctgctggcgctcagactgcagcgctggcacaagtcacgcctgctgcaggcttcgggaggtggcttagcgagcatgcccggctcgcactttgtgggcgtggaaggggttcgggctttcctgcagacctattcccacgaggtctcactcactgcagactcgcgtaagagtcatctgattttcccccagcccaactatgccgacacgcttatcaaccaggagagctatgagaaaagcgagcctcttctgataactcaggatttacttgaaacgaaaggagaacccaggcaacttcaggtgagtttctttccgcctaagcgggaagagtaatctgatcttcccgcaacccaactaatcagacaggctcatcagctagatcggctgttntagaagcgaacctcttttggtacaggaagattcgtgattttgtaaagtggaagactcccttgttcaggtgagggtatcgtttttttttttttttttttttgagacggagtctcgctctgtcgcccaggagaatggcataaacccgggagatggagcttgcagtgagcggagatcctgccactgcactccagcctgggcaacagagcaagactccatctcaaaaaaaaaaaaaaaaaaaaaaaaaaaacctcgagggggggcccagtacccaattcgccctctagtgag

SEQ ID NO: 218 - DNA, 499 bp, Homo sapiens
  SITE (465): n equals a,t,g, or c
gacaaattagtgaaaatgcagycactgakatgcggwtccctctaccccacgcctgggatccggatatcggsaagaactctctgcagagctacgagctcagcccgaacactcacttctccctcatcgtgcaaaatggagccgacggtagtaagtaccccgaattggtgctgaaacgcrccctgraccgcgaagaaaaggctgctcaccacctggtccttacggcctccgacgggggcgacccggtgcgcacaggcaccgcgcgcatycgcgtgatggttctggatgcgaacgacaacgcaccagcgtttgctcagcccgagtaccgcgcgagcgttccggagaatctggccttgggcacgcagctgcttgtagtcaacgctaccgaccctgacgaaggagtcaatgcggaagtgaggtattccttccggtatgtggacgacaaggcgggccaagttttcaaactanattgtaattcagggacaatatcaacaatagggga

SEQ ID NO: 219 - DNA, 560 bp, Homo sapiens
  SITE (484): n equals a,t,g, or c
  SITE (491): n equals a,t,g, or c
  SITE (543): n equals a,t,g, or c
gcatttacatgccctgtttcatttaatcctcaagaaagccctgtaagttggcattgttatccccacattacagatgaggaactaaggtttaaaaggtgaagtaacttgagctcagaaagattaagcagctcgccctaggggaatcataagctagcatggataaagcccatatatattagraccctgatcagaccagcttcagactctgctcctaaccactgctgcatacatccagaaagtgcggtgctgtggtaattatcttacaaggtattgatgagaatgaaagaaaattgtctcacccttttttcgacttactgtcacctgatgaaaatgacctatttaggaagacaattttattctatactaaacctgtaagtctccaggtatttgattggcttgccatattccttctcctgattctggaagagtccagtaactgatattttacatgtaacaggacaaataacatttgaactttcagtgntagatantttttaaaattaacctgcatttgggggctttttttctcaaggtcatttgttngtttattaaggaaactc

SEQ ID NO: 220 - DNA, 2799 bp, Homo sapiens
  SITE (2766): n equals a,t,g, or c
  SITE (2782): n equals a,t,g, or c
  SITE (2798): n equals a,t,g, or c
gaaaaagtgcctttagaaaaggaagaaacaagtcatattgaagaacttcaatctgaagaaactgccatatctgatttctctactggcgaaaatgttggaccacttgctttaccagttgggaaggcaaggcagttaattggactttacaccatggctcacaatcctaatatgacccatttgaagattaatctgccagttactgcccttcctcccctttgggtaagatgtgacagttcagatcctgaaggtacttgttggctaggagctgagcttatcacaacaaacaacagcattacaggaattgtcttatatgtggtcagttgtaaagctgataaaaattattctgtaaatcttgaaaacctaaaaaatttacacaagaaaagacatcacttgtctactgtaacatccaaaggctttgcccagtatgrgctctttaagtcctctgccttggatgatacaatcacagcatcacaaactgcgatcgctttggatatttcctggagtcctgtggatgagattcttcaaatccctccactctcttcaactgcaactctgaatattaaagtggaatcaggagagcccagaggtcctttgaatcatctctacagagaactgaaatttcttcttgttttggctgatggtttgaggactggtgtcactgaatggctcgagcccctggaagcaaaatctgctgttgaacttgttcaggaatttctgaatgacttaaataagctggatggatttggtgattctacaaaaaaagacactgaggttgagaccttgaagcatgacactgctgcagtcgatcgttccgtcaagcgtcttttcaaagttcggagtgatcttgattttgctgagcaactgtggtgcaaatgagcagtagtgtgatttcataccaagacttggtgaagtgtttcacattgatcatccagagtctacaacgtggtgatatacagccatggctccatagtggaagtaacagtttactaagtaagctcattcatcagtcttatcatggaaccatggacacagtttctctcagtgggactattccagttcaaatgcttttggaaattggtttggacaaactaaagaaagattatatcagttttttcataggtcaggaacttgcatctttgaatcatttggaatacttcattgctccatcagtagatatacaagaacaggtttatcgtgtccaaaaactccaccatattctagaaatattagtcagttgcatgcctttcattaaatctcaacatgaactcctcttttctttaacacagatctgcataaagtattacaaacaaaatcctcttgatgagcaacacatttttcagctgccagtcagaccaactgctgtaaagaacttatatcaaagtgagaagccacagaaatggagagtggaaatatatagtggtcaaaagaagattaagacagtttggcaactgagtgacagctcacccatagaccatctgaattttcacaaacctgatttttcggaattaacactaaacggtagcctggaagaaaggatattctttactaacatggttacctgcagccaggtgcatttcaagtgaagtgtgctgatgaagtcctctataagcacaagccaaaaagagaaagagaaaaaaaggtaattattgtagaacctgaaaacagcaatgtatggaaaccctcaaagcagaaaagggaggaagatcctgaagattctcttatgaagctccaaaattgataatcctgtctcagctctgcctcctcaggaggagcattagtagaacagcagtgatgaggacacagagggagcagacagtgggtaccacgatctccgtaaccatttgcatgtgacttagcaagggctctgaaatgacaaagagaacgagcaccacaaatgagaacaggmtcattttagtaaatacagctttatcccaaaagctttaactgtattggraaaacttaaaaaatagcatcctcaaattttctgattcttatttgccatgaaatagaacttagtaaattaaatgttatttgaaaatgttataagagctttgtaaatatttcagaaaatatgggataaatgcctgaatttggttcttctacaggtgctataataaagtccatctctcaatacttatactttctaaattcatctcagaatattagcagccatattccacagttcctataatttttactgggggggatttgtgataggaaagtccttgggaaacatttccaatctttcaaaatattattgtgtatcttaagaagtataggaacttgtatgttgaaatgttgtatggtagttcttgtatagttaaataataatctttttaagagttaatgataagcatatgttatgtgcattattaataaaatagtggccacttaggtaatacccacttttatcttgtgtgctgggtactctggttactgagataaataaggcactggacatcctcacgtggagttcacaggctcatcagtgaattctgtaccacatttcaaccttgtttattttagtttaatggaatatacattcttagtattgcctgattatttaaatttgttgagggggattgcatgttgctttattggcctgtaaaaatagctagtttggtaagatttggtctcgcaccttccatctttgctaccacattaaagatgagcttgttaaaaaggaaagcatatttctctgattgcccttatggagaaataaagataaaattcaaagaaamaaaaaaaagggcgggccgtctaaanggatccaagcttacgnacgcgtgcattgcgang

SEQ ID NO: 221 - DNA, 1088 bp, Homo sapiens
ggcacgagacgagggcagcaccagctggaaggcggccttggaggcttccaagggctgcatcaagtgcgaagcgccctgcccggaggactggctgctctacggaaggaagtgctacttcttttccgaggaacccagagactggaacacaggcaggcagtactgccacacccacgaggcggtgctggctgtgattcagagccagaaggagctggaatttatgttcaagttcacgcggagggagccctggattggactacgcagagttggggacgaattccactgggtcaacggggacccgtttgatccggacacgttcaccatcgcaggtccaggggagtgtgtcttcgtggagcccaccaggctggtgtcgacggagtgtctgatgacccggccctgggtgtgcagcaagatggcctatacttgaggtgggtggggccagaggtggccccggcccctaggcctgtgggaggtgtctggtgtctgctcaagacctgcttccagcggagccgcctgccctctgcaaggcgaagcggtgggtgcgtggcctccgccccaggcccctctcccaggccctggcgctctgagtccctggttcctggcctcctttgtctgcaggcaggtcgtgtggctcagcagttaaatcccatatgctaggtagtgtaggcatctgcccacctacacacacacacatgcataggtacacgcacgcacagacgctgtcccttctgaagctcagtgtccatcctgagccaccccacagatctctctccggccccctagaagccctctcctcactgcagccctggtgctctggggaaggaggggcattgacaggtggtttgactgttcacccagcagccccgcttcccccctggtttctctcctggctgccggcggaggtaggctgggaaagcttccccctcacctaggccgggccagccccgccccgggccccagaggtcccctgcatcccccttctttgccttgcctgggttctcaggcagggcccctgctgtgtccgtggtgctgttgtattggtcactaacggaataaagagttaatatctcaaaaaaaaaaaaaaaaaaaaa

SEQ ID NO: 222 - DNA, 2244 bp, Homo sapiens
  SITE (10): n equals a,t,g, or c
  SITE (11): n equals a,t,g, or c
  SITE (2007): n equals a,t,g, or c
  SITE (2121): n equals a,t,g, or c
cgtgccgtcnncttgcaagcgccctaagcgcccgtcctttcgctttcttcccttcctttctcgccacgttcgccggctttccccgtcaagctctaaatcgggggctccctttagggttccgatttagtgctttacggcacctcgaccccaaaaaacttgattagggtgatggttcacgtagtgggccatcgccctgatagacggtttttcgccctttgacgttggagtccacgttctttaatagtggactcttgttccaaactggaacaacactcaaccctatctcggtctattcttttgatttataagggattttgccgatttcggcctattggttaaaaaatgagctgatttaacaaaaatttaacgcgaattttaacaaaatattaacgcttacaatttgccattcgccattcaggctgcgcaactgttgggaagggcgatcggtgcgggcctcttcgctattacgccagctggcgaaagggggatgtgctgcaaggcgattaagttgggtaacgccagggttttcccagtcacgacgttgtaaaacgacggccagtgaattgtaatacgactcactatagggcgaattgsstaccgggccccccctcgagtttttttttttttttttttttgagatattaactctttattccgttagtgaccaatacaacagcaccacggacacagcaggggccctgcctgagaacccaggcaaggcaaagaagggggatgcaggggacctctggggcccggggcggggctggcccggcctaggtgagggggaagctttcccagcctacctccgccggcagccaggagagaaaccagtggggaagcggggctgctgggtgaacagtcaaaccacctgtcaatgcccctccttccccagagcaccagggctgcagtgaggagagggcttctagggggccggagagagatctgtggggtggctcaggatggacactgagcttcagaagggacagcgtctgtgcgtgcgtgtacctatgcatgtgtgtgtgtgtaggtgggcagatgcctacactacctagcatatgggatttaactgctgagccacacgacctgcctgcagacaaaggaggccaggaaccagggactcagagcgccagggcctgggagaggggcctggggcggaggccacgcacccaccgcttcgccttgcagagggcaggcggstccgctggaagcaggtcttgagcagacaccagacacctcccacaggcctaggggcggggccacctctggccccacccacctcaagtataggccatcttgctgcacacccagggccgggtcatcagacactccgtcgacaccagcctggtgggctccacgaagacacactcccctggacctgcgatggtgaacgtgtccggatcaaacgggtccccgttgacccagtggaattcgtccccaactctgcgtagtccaatccagggctccctccgcgtgaacttgaacataaattccagctccttctggctctgaatcacagccagcaccgcctcgtgggtgtggcagtactgcctgcctgtgttccagtctctgggttcctcggaaaagaagtagcacttccttccgtagagcagccagtcctccgggcagggcgcttcgcacttgatgcagcccttggaagcctccaaggccgccttccagctggtgctgccctcgtctcgtgccgaattcctgcagcccgggggatccactagttctagagcggccgccaccgcggtggagctccagcttttgttccctttagtgagggttaatttcgagcttggcgtaatcatggtcatagctgtttcctgtgtgaaattgttatccgctcacaattccacacaacatacgagccggaagcataaagtgtaaagcctggggtgcctaatgagtgagctaactcacattaattgcgttgcgctcactgcccgctttccagtcgggaaacctgtcgtgccagctgcattaatgaatcggccaacgcgcggngagaggcggtttgcgtattgggcgctcttccgcttcctcgctcactgactcgctgcgctcggtcgttcggctgcggcgagcggtatcaagctcactcaaaggcggtaatacggntatccacagaatcaggggataacgcaggaaagaacatgtgagcaaaaggccagcaaaaggccaggaaccgtaaaaaaggccgcgttgctggcggtttttcataagcttccggccccctgacga

SEQ ID NO: 223 - DNA, 1281 bp, Homo sapiens
gatctggttgaactacttaagcttaatttgttaaactccggtaagtacctagcccacatgatttgactcagagattctcttttgtccacagtcatctcaggagcagaaagaaaagagctcccaaatgctatatctattcaggggctctcaagaacaatggaatatcatcctgatttagaaaatttggatgaagatggatatactcaattacacttcgactctcaaagcaataccaggatagctgttgtttcagagaaaggatcgtgtgctgcatctcctccttggcgcctcattgctgtaattttgggaatcctatgcttggtaatactggtgatagctgtggtcctgggtaccatggctatttggagatccaattcaggaagcaacacattggagaatggctactttctatcaagaaataaagagaaccacagtcaacccacacaatcatctttagaagacagtgtgactcctaccaaagctgtcaaaaccacaggggttctttccagcccttgtcctcctaattggattatatatgagaagagctgttatctattcagcatgtcactaaattcctgggatggaagtaaaagacaatgctggcaactgggctctaatctcctaaagatagacagctcaaatgaattgagtctcactctgttgcccaagctagagtgcagtgaagccgcgacatcccaggctcaagtgatcctcccacctcagcttcctgagtaggtaggactacagggtgcaccaccacactcgtctaatgtttttttgtatttttcatagagacgaggtttctccatatcatctgggctggtctcaaaatcctgggcacaagcgatctgcctacctcgatctcccagtgttgggattacaggtgtaagccaccatacttggccaaaattcatttttaatatctctataattataatcatagcatgccttaagcacataaagtgcatagtatatgcttttatttttaactaatttaaaaaactgtgtttcgccttaaaacaaatcctttcaaacatactccatgtatgcatgactacaataatcaggacactacccatttttgtgagtttgkatttcaatttttaaatatggtggaagtaaagtagaaaattcttctccttgtcatcataattatcaagaaaaatggcaacaatgataatatatgtttagaaattatttactctttgcaagatactgggaaaggcaaagagggttaaaacataaccctgctatcacaggacacatataatcttttaagta

SEQ ID NO: 224 - DNA, 3029 bp, Homo sapiens
ggcacgagagaggaccatgtcatacatacaaagtacaaagacttaatgagtcaacatcctataaattctgtattcaagcttgtaatgaagctggggaaggtcccctctcccaagaatatattttcactactccaaaatctgtcccagctgccttgaaagcccccaaaatagagaaagtaaatgatcacatttgtgaaattacatgggagtgtttacagccaatgaaaggtgatccagttatttacagtcttcaagttatgttgggaaaagattcagaattcaaacagatttacaagggtcccgactcttccttccggtattccagccttcagctgaactgtgaatatcgcttccgtgtatgtgccattcgccagtgccaagactctctgggacaccaggacctcgtaggtccctacagcaccacagtgctcttcatctctcagaggactgaaccaccagccagcaccaacagagacactgtggaaagcacaaggacccgacgggcactgagtgacgagcagtgtgctgccgtcatccttgtgctgtttgctttcttttccattttgattgcctttatcattcagtactttgtaatcaagtgaaaatataactttattttttaactctattacattttattttgtcatgtactaaaattatttctgtattgcttttataaaaaacagtggcatttagcactggcattgagactatagcacatcatttttgccattttcagtgcttatattgttaggtagaggctggcactttattagaatgcaagccacaaaaatatcaattttgttttttttgttagggtgggtcttctttttttctttccctctctctttttttaacaaatgccttcttatagaaaaactttctaagaggcaacaatttagaatggatattttgacgaatcggcatgagtgtaacagtgataacctgatctgtttgttttaaagattattaccaagtgaaaaattcagaatgaatagaatttacactaacatgctatataaaatgttaaagtctgatgctgtgaaagcaatctagtgctatatttctacctcctcatttgtcttaattatttggtaagtgggattatgatgagtaactggaggggcttagaaacaaaaactggatgaaagagtatgcatgaagaaaagcttctttgataaatgtggagttcttcattataaatatatattcatgaattcacagataagtacttaaagaacagacagtttacttggcctaaaaatattttgatgtttactcaaaaagtacctcttcaggtcttgagaacatggaaaagaattgagtgcttttaaatactttttagaaagtaatcataaaagtaaattgaatttcaaacctatttggcttctgttttgtgaacctttgaactatatgtatgtgtataagggtatacacatacatatatggcatataacaagtgtacacatatacacataacaagtgtagaagtatatattacatacatacactcactctgtctggtataggctaattttgaagaactcccataagtttctgctgcttctcccataactgctgccaccaccatcagaattcataatcaaacctaacctttttgtttggggcaccaaatctgaagacaaaattaatttgcaccagtaaacttcaagctgctttctttcttgaaaactaaacgtttaacgtataatgtctgtttggatactgttccaaattgttgattgcatgtggttaatgttgcattagagcactttgcaattgcataattcattaatgttttgtgagcttgcatttgtgagttattggatgatcagactgaattttgtcaagtatcacattgtacatcttgcctagatgtcgatgactgcaagtaataatacagtttataatgaaactatctacaattcttgttttagcacatctgttatccgtaaaacacctgtaactagcttttttaatttattatttgaattttaggatagcgaatcactaatttttagttgctgaggttggcattttagtgattattaagcacttctgtcagtctttgaaaaaagaacgtattttttgtgctttgaagatctctgaagaatttcttttataatagaatgggcatgtattgtaacagttttatgtcaaatgatctgtgctgtagaaaaacattaacccttgttcaaaaaagaaatggataaacttggcctttctaagtggtaagaatgacctgtcactataatatactgtatgtttacattttatttaaatttaatctcttatgtatagggtgataaccttccccagaaacaacagtgattgcgattgttttctagaaacttctttaaagtgccacatttggcagtacaaatgagtctgagtgtaatagcccagagatttatatatagttgaatgtctaaaatggtaaaatgtgccactgtgtcaagttacagtggcttatgtttttcatagtaattcaaatgaacttcctatttttgatagtaaatgtcatttaatagtatacttgccatttgagcctcactgcaaaattagtgcagaggagaaaacaatttttaatgtaatcttgattttacctcatatactgtacattccaaaaactctaaactttttaaagattatagatacactaccaaacatatcaccttaaaattgtataaggctgaatgaacttcatacaaatgaaaaaaatctcataaaaatacataaactatgtagcaaaagtatctgtaaaatccatggaaaataaaagttgtatcattctttttgagatacgtttattgtattcatatatattcattatttgctacctgtttaagaaagtgaaatgttatggtctcccctcttccaatgagcttaaaacatttttcccaacagtatataaatcttcaacatgagaggatgtatatttattatataaagcccagtaaagaataaaattagaagttttatcctagtaaaaaaaaaaaaaaaaaaaaaaaaaaaaaaaaaaaaaaaaa

SEQ ID NO: 225 - DNA, 687 bp, Homo sapiens
ggccctggacgggagcagatcagtgaataccaagtcctgatcacggcctcagatagtggctcacccccacttagcacccgaagacaatcactgtgtcagttgctgatgtgaatgacaatacaccaaactttcctcaaccccagcaggaacttttcgttgctgaaaacaatggccctgggcttctctaggccgagtgtttgcccaggaccccgacctggggaagaatggccttgtctcttatgagctgttggatgttatctctgaagggccatcagcctctagcttgctggcagtggaatcatccagtggggccatcactgccaaaacttcctttggactttgagcagctcagggggtttcatttccaagtagaaggccgggatggtggcattcctcccagaagtgcaacagtgactataaacttgtttgtggtagataggaatgacaattatccggttatcttgtttcccttgcccagaaatggttctgtcccagtggaaattgtgccccgctctgccaggactggacacttggtcacaaaagtggtagcagaggatgctgacagtggttctaatgcctggytttcctaccacatctcccgggcgtctgactctagtctctttagaatttcagccaatataggtgagctccgtactgctcgcttagttcttcccacttcagatttgg

SEQ ID NO: 226 - DNA, 1074 bp, Homo sapiens
  SITE (698): n equals a,t,g, or c
  SITE (1030): n equals a,t,g, or c
  SITE (1072): n equals a,t,g, or c
aatgccggcgttcgggaggcgcaacgtcggcggtcgctgagtatccagcccgcagcagtgacggccggcaggagcgtgctcttccccgcggctcgtgctctccaggagtcccgagcatgttcctgggtcaccgttggtgtagcgtgttggtggaacgtggacgcctagagggaggatggtgggctgtggggtggcagttttatgtttgtgggtttctgcggcctgcagcgggacagctcgagtactcagtgccggaggagacggagcggggcgtaccgtaggcaatctctccgcggacttgaggctgccagcggccgctatgtctcgcggaactttcgcttcctttccagccaccgcgagctctacttcggggtggatctacccagcggcaatttggtggtcagagagccggcggaccgcgaacagctgtgcagggccaaagctgcctgcgtcttgacctacgacctggtgctcgaggacccgctggagctgcacaagattcggattcacgtcctggacaccaatgacaactcacctctctttcctgccggcgacgtgcagctgcacatccccgagttcctgacgcccggagmscgctttactctcccgaatgcccaagatgacgacgagggaagcaatgggatactaagctacagcctaagccccagtcagcactttcgcctggacatgggatcgcnggttgacggcagcgaatacccggagttggtgttggagaaagcactggatcgcgaacagcgcgccacccacctgctggtgcttacagctcgggacggcgggctacctgcccgctcaggagacgcacaagtcaccatcattgtggtggacacaaatgacaacgcgcctgtatttgagcgctccgtataccgcaccaaggttccagagactgcacccaatgggactgtgttattccgagttcaagccttggatccagatgaagggtccaatggggaagtccagtactccctaagctacagcacgcaagcagagctgcgacaccgctttcacgtgnaccctaaaagtggggaggtgcaagtagctgcttcactaggtncc

SEQ ID NO: 227 - DNA, 284 bp, Homo sapiens
  SITE (258): n equals a,t,g, or c
gtggtgactgcgcgggatgggggctcgccttcgctgtgggccacggctagagtgtccgtggaggtggccgacgtgaacgacaatgcgcctgcrtwcgcrcacccgartacacagtgttcgtraaggagaacaacccgccgggctgccacatcttcacggtgtcggcatgggacgcggacgcgcagaagaacgcgctggtgtcctactcgctggtggagcggcgggtgggcgagcacgcactgtcgagctacgtgtcgntgcacgcagagagcggcaaggtgtac

SEQ ID NO: 228 - DNA, 832 bp, Homo sapiens
  SITE (1): n equals a,t,g, or c
nattcggcacgatggacaacaccgtgctcctcgaccccccactgatcgcgctggataaagatgcgcctctgcgatttgcaggtgagatttgtggatttaaaattcacgggcagaatgtcccctttgatgcagtggtagtggataaatccactggtgagggagtcattcgctccaaagagaaactggactgtragctgcagaaagactattcattcaccatccaggcctatgattgtgggaagggacctgatggcaccaacgtgaaaaagtctcataaagcaactgttcatattcaggtgaacgacgtgaatgagtacgcgcccgtgttcaaggagaagtcctacaaagccacggtcatcgaggggaagcagtacgacagcattttgagggtggaggccgtggatgccgactgctcccctcagttcagccagatttgcagctacgaaatcatcactccagacgtgccctttactgttgacaaagatggttatataaaaaacacagagaaattaaactacgggaaagaacatcaatataagctgaccgtcactgcctatgactgtgggaagaaaagagccacagaagatgttttggtgaagatcagcattaagcccacctgcacccctgggtggcaaggatggaacaacaggattgagtatgagccgggcaccggcgcgttggccgtctttccaaatatccacctggagacatgtgacgagccagtcgcctcagtacaggccacagtggagctagaaaccagccacatagggaaaggctgcgaccgagacacctactcagagaagtccctccaccggctctgtgctgcggccgc

SEQ ID NO: 229 - DNA, 1600 bp, Homo sapiens
  SITE (859): n equals a,t,g, or c
gggcacgaggcttcatgcgcgtcagcctgctgccggacgagcagatcgtgggcatttctcggatccagagaaatgcctactccatcttctttgatgagaagttctccatccccctggwtcccacagccctggrggrgaagagcctgcggttttytgtatttggcatcgatgaggatgagcgcaacgtcagcacgggggtggtggagctgaagctttctgtgcttgacctcccgctgcagcccttcagtggctggctctatttacaggaccagaacaaggccgccgatgctgtgggggagatctgctctccctcagctacctycccacagccgagcgsctcamcgtggtcgtggttaaggccaagaacctcatctggaccaacgrcaagaccacarcggaccccttcgkcaaggtgtacctgctkcargatkggaggaagatkagcaaaaagaagacagccgtgaagagggatgaccccaacccggtgttcaacgaggccatgatcttctcggtgccagccattgtgctccaggacctgtctctccgcgtgacggtggctgagagcagcagcracggccgtggggacaacgtgggccatgtcatcattgggccgtcagccagtgcatgggaaccacamattggaaccagatkttggccacgctgcgcaggcccgtgtccatgtggcacgctgtccggcgaaactagcaaccagggcgggccagttgggcaatggagctgctggagcccggtacccactcagctctgtctgatgccctctccatagcccagctggagccgtgaacactggggtcccctggcagagtcctcatgacccatcctggtctctctgtccagattncagcagaggagtgggcgtggctctgtgtccagggccccagggtctgctcctgctgaggaccagctgtggctggccagggacagaggactyaaccctgctcctcccggtaggccagctgccgagccgggctatgttctggaacccagtgaatyttgggggccaggsactgtgctaggsaccagcargggtaacamgaagaagacccggcccttagggcatcaggaagactagctcccctgccccggaggatctgctcagtgctgatggcagcccagctgtgtggactcagggggctctgagggctagggaaacaggaagggcctctttgacaaggtaggagctgtgcttggaggggcaggaaaagaactgagcatgtcgcaggcagcgggcccagcctgagcaatggcaggatgtgaacttccccatcgcaaatgcagttctcagcccactgcagtggatacaaggaagggcctttytcggggccggagaagagaccaagrgaccaggcccgggcagcagcctaccggccacgtggaacactggctccggagttattctctgtcaaatctactccccggacctcaaccatggcaagaaccagaggtccaaagaggcccagacccaggtccttgtgctcagtcctgcgcaaaccaggcccagaccctgcaagcatttgttgatgcccttgcaggcccactgggagaaagatgcctcaggcaggtctcagcctgggggtggcag

SEQ ID NO: 230 - DNA, 722 bp, Homo sapiens
  SITE (90): n equals a,t,g, or c
  SITE (99): n equals a,t,g, or c
  SITE (722): n equals a,t,g, or c
ctcttctagccgcaccccatccgggtctgcagacccaaccctcctgaggcccctttccattagcccctgctccacggataagcccgcctntcgcaggtnccaccctctcccgacggaccttccgagccgcgggttactcgccctgtccctcaagtacgtccccgccggctccgagggcgcaggactgcccccgagcggggagctgcacttctgggtgaaggaggctcgggacctcctgccgctgcgggcaggatccctggacacttacgtacaatgcttcgtgctgcctgatgacagccrggccagccgccagcgtacaagggttgtgcgacgcagcctcagccctgtgttcaatcacaccatggtgtacgatggctttgggcctgctgacctgcgccaggcttgtgccgagctctccctctgggaccatggggccctggccaaccgccagctgggrggcacacgcctcagcctgggcaccggcagcagctatgggctgcaggtgccctggatggattccacacctgaggagaagcagctgtggcaagccctcctggagcagccgtgcgartgggtggatggccttctacccctcagaaccaacctggcccccaggacgtagccccaccaagcctctctctctggacccccatctcagggcctgcccttggctaaagtcaataaagtctattctaagagcaaaaaaaaaaaaaaaaaaaaan

SEQ ID NO: 231 - DNA, 344 bp, Homo sapiens
ggaccccggtgtctggcttcccccgagccgggaccccgcgatggccaagcgcactcgctgtacatccgcatcgtggaggggaagaaccttcccgccaaggacatcactggcagcagcgacccctactgcatcgtgaaggtggacaatgagcccatcatcaggacagccacagtgtggaagaccctgtgccccttctggggtgaggagtaccaagtgcacctgccgsccaccttccacgctgtggctttctatgtcatggatgaggatgccctcagccgggacgacgttatcggaaaggtctgccttacaagggacaccatagcctctcaccctaagggtttcag

SEQ ID NO: 232 - DNA, 889 bp, Homo sapiens
  SITE (457): n equals a,t,g, or c
  SITE (531): n equals a,t,g, or c
  SITE (815): n equals a,t,g, or c
  SITE (845): n equals a,t,g, or c
  SITE (861): n equals a,t,g, or c
gctctggataggcaggcacaggggcaccctgtggccgtatcagcttcgccctgggtacctctatggctcggaccagctggtggtgaggatcctgcaggccctggacctccctgccaagractccaacggcttctmaracccctacgtcaagatctacctgctgcctgaccgsaagaaaaagtttcagaccaaggtgcacaggaagaccctgaaccccgtcttcaatgagacgtttcaattctcggtgcccctggccgagctggcccaacgcaaactgcacttcagcgtctatgactttaaccgcttctcgcggcasgacctcatcggccaggtggtgctggacaacctcctggagctggccgagcagccccctgaccgcccgctctggagggacatcgtggagggcggctcggaaaaagcagatcttggggagctcaacttctcactctgctacctncccacggccgggcgcctcaccgtgaccatcatcaaagcctctaacctcaaagcgatggacctcactggcttctnaracccctacgtgaaggcctccctgaatcagcgaggggcggcgtctgaagaagcggaaaacctccatcaagaagaacacgctgaaccccacctataatgaggcgctggtgttcgacgtggcccccgagagcgtggagaacgtggggctcagcatcgccgtggtggactacgactgcatcgggcacaacgaggtgatcggcgtgtgccgtgtgggccccgacgctgccgacccgcacggccgcgagcactgggcagagatgctggccaatccccgcaagcccgtngagcactggcatcagttagtggaggaaaancttttaccagttttanaaaaggaacaaaggctttttaggggaag

SEQ ID NO: 233 - DNA, 823 bp, Homo sapiens
  SITE (86): n equals a,t,g, or c
  SITE (682): n equals a,t,g, or c
  SITE (748): n equals a,t,g, or c
  SITE (806): n equals a,t,g, or c
  SITE (814): n equals a,t,g, or c
gcgcctcctgcccgatccgcgctgaccctgcgcgggacgcagccccaggcggctgcctagccgaggcgggagcccgagctgagtcnagctcgccggagcggctgtgctggatgccctggaggaacaaggaggcctccagtccctcttctgctaatccccccttggaagccctccagagccccagcttcagaggcaacatggcggacaagctgaaggaccccagcaccctgggcttcctggaggcgggccgtgaagatcagccacacgtccccagatatcccagctgaggtgcagatgtcggtcaaggagcacatcatgcgtcacacccggctgcagcggcaaactacagagccagcgtcatccaccaggcacacgtccttcaagcgccacctgccaaggcagatgcatgtctccagtgtagactatggcaatgagcttccaccagcagcagagcagcccaccagcattggccgcatcaagcctgagctctacaagcagaagtcggtggatggggaggatgccaagtctgaggccaccaagagctgcgggaagatcaacttcagcctacgctacgattacgagaccgagaccctgattgtgcgtatcctgaaggcttttgacctccctgccaaggacttttgtgggaagctctkgacccttatgttcaagatcttacctcctngcctggaccggcaaatggcaagsttgcaggacccgggttgcamcgcaaggaccctgraaccccacntttkgatggaggaatttccatttccttgtggccttttgagggagttgggttgaaccgnaagttgcntttcagtgt

SEQ ID NO: 234 - DNA, 483 bp, Homo sapiens
  SITE (411): n equals a,t,g, or c
  SITE (464): n equals a,t,g, or c
ggggtcgacccacgcgtccgtgaaatagcattttctctmmttttcccagcactagtatataacctatgaggaacccttgtctctgaatctgctcagcttgaaattttgtctctgaaagaagttggtgacattaaggcatctacagagatgaggttaagaagattccagtcagtggaaagtggagcaaataacgttgtcttcatcaggacacttgggatagagcctgagaaattggtgcatcatattctccaggatatgtacaaaaccaagaaaaagaagactcgagttattttgcgaatgttacccatctcaggcacatgcaagctttttagaagatatgaaaaaakatgcagaaacatttttggaacccyggtttaaagctcccaacaaagggacattcagatgtgtacnaatctcgaaaatacccagtcctgtgaatagagaagaagttatcagaggaattngcagggatagtgtgcaccc

SEQ ID NO: 235 - DNA, 628 bp, Homo sapiens
  SITE (8): n equals a,t,g, or c
  SITE (13): n equals a,t,g, or c
  SITE (19): n equals a,t,g, or c
tggcaagntagcnaagagntgaggttcagccagtcagctttcaggaggagtgtgactgcggaggccagggccatcacttgtgccttccgccctggctgagagctgggaagaggggtgccatcgggcctggtcccgggccgtctttctgaggccagggctgtgagaattcacaggtgaatcgctcttctcaagacatcagaatccaaggctgcagccttgctgacgtgcgacacgtcatgcttgcaggctaatttttcttagctcatcacttccccactctatctcgccccagcttgatccaatccctcgttccctaggtgtgtttgtcaaagtgtctctgatgaaccacaacaagtttgtcaagtgcaagaagacttcagctgtgctgggctccatcaaccctgtgtacaatgagaccttcagcttcaaggccgatgccaccragctggataycgctagcctcagcctgaccgcggtgcagaacatggaaggggacagtaaggccacaccctaccctgggctgctgggatggggaccacgaggggctgccgagtgttcaggcagagtgagtgcctcctgtcctgacctcagaaggagctgtacgagctccctccctggttaaggaaaa

SEQ ID NO: 236 - DNA, 231 bp, Homo sapiens
taggtgatggaaggaagtgggtctgggcggtgggaaggttcttgtccaccgctgggcacttgttctttcccgcagtgaccccytctgactgctacgtgactytctggctgcccacggcctgcagccacaggctccagacacgcacggtcaagaacagcagtagccctgtctggaaccagagctttcacttcaggatccacaggcagctcaaggtgggccaggcatcagcgc

SEQ ID NO: 237 - DNA, 2016 bp, Homo sapiens
  SITE (37): n equals a,t,g, or c
  SITE (48): n equals a,t,g, or c
  SITE (93): n equals a,t,g, or c
cctactagaactccactgaaacctctaggtgactttngggaaggtacncctgcaggtaccggtccggaattcccgggtcgacccacgcgtccngtcttctgtgagtggcagtgtgatgagtgtttatagtggagactttggcaatctggaagttaaaggaaatattcagtttgcaattgaatatgtggagtcactgaaggagttgcatgtttttgtggcccagtgtaaggacttagcagcagcggatgtaaaaaaacagcgttcagacccatatgtaaaggcctatttgctaccagacaaaggcaaaatgggcaagaagaaaacactcgtagtgaagaaaaccttgaatcctgtgtataacgaaatactgcggtataaaattgaaaaacaaatcttaaagacacagaaattgaacctgtccatttggcatcgggatacatttaagcgcaatagtttcctaggggaggtggaacttgatttggaaacatgggactgggataacaaacagaataaacaattgagatggtaccctctgaagcggaagacagcaccagttgcccttgaagcagaaaacagaggtgaaatgaaactagctctccagtatgtcccagagccagtccctggtaaaaagcttcctacaactggagaagtgcacatctgggtgaaggaatgccttgatctaccactgctaaggggaagtcatctaaattcttttgttaaatgtaccatccttccagatacaagtaggaaaagtcgccagaagacaagagctgtagggaaaaccaccaaccctatcttcaaccacactatggtgtatgatgggttcaggcctgaagatctgatggaagcctgtgtagagcttactgtctgggaccattacaaattaaccaaccaatttttgggaggtcttcgtattggctttggaacaggtaaaagttatgggactgaagtggactggatggactctacttcagaggaagttgctctctgggagaagatggtaaactcccccaatacttggattgaagcaacactgcctctcagaatgcttttgattgccaagatttccaaatgagcccaaattccactggctcctccactgaaaactactaaaccggtggaatctgatcttgaaaatctgagtaggtggacaaatatcctcactttctatctattgcacctaaggaatactacacagcatgtaaaagtcaatctgcatgtgcttctttgattacaaggcccaagggatttaaatataacaaaatgtgtaatttgtgactctaatattaaataagatatttgaacaagctaggaaaattgaatttctgctgctgcttcaaagaaaaagctgccccagagcattaaacatggggtattgttaagaagcaaaatgttcttgtttgccatcatgtgtttcacaccacaattctgtgccacagttaagagggtctggtacccttgcaggacctttgtaggttgtgggaaaaagtcgcagaaagatactcaaagtggagcagggaatggagacagacatcagtgatgataaaaaaaaaaatggaccttaagaaactatttactctgtaatctctaataaaatatggaattccatattagggcaatgagactgaaactactggtgtttttctgccttgagaaaacaaacagttaaaacaagcctcaaatgtattttagtgccacccactggccataggtacaattcagttgttggcttgttttgacttaattctaaaataggtctcaagcctgtatttttatgagtttatttttttaaaaccctgcatatatatgattgtttttcttataactttactatatgaaagcagcataagagtagtcacaaacatgttttgcaacaaagttttaattagaatgtaagttgctcagttatactgttcttcttatgtatgtaaaattttcgtattttgtaaaaacccttagaataaattatcatttgatttaaaaaaaaaaaaaaaaaaaaaaaaaaaaaaaaaaaaa

SEQ ID NO: 238 - DNA, 2219 bp, Homo sapiens
  SITE (10): n equals a,t,g, or c
  SITE (572): n equals a,t,g, or c
aagcaatacnaagatgccatccgagcccacaaggctggccgagccgtggatgtcgctgaattgcccgtgccacccaggyttccccccaatccagggcctggrggccaccaagcccacccagcagagtctggtgggtgtcctggagactgccatgaagctggccaaccaggatgaaggcccagaggatgaagaggwtgaggtgcctaagaagcagaacagccctgtggcccccacagcccagcccaaagccccaccctcaagaactccccagtcgggatcagccccaacagccaaaggcgccccccaaagccacatccaccagagcccagcagcagctggccttcctagagggccgcaagaagcagctcctgcaggccgcactgcgagccaagcagaaaaacgacgtggagggtgccaagatgcacctgcgccaagccaagggactggagcctatgctggaggcctcgcgcaatgggctgctgtggacatcaccaaggtgccgctgccctgtcaacaaggacgactttgcctggtccagcggcctggcccgggtctgtctcaggaggccgccnggcgctatggtgaactcaccaagttcatacggcagcagcacgagatgtgcctgaaccactcaaaccaattcacccagctgggcaacatcactgaaaccaccaagtttgaaaagttggcggaggactgtaagcgggcatggacattctgaagcaagccttcgtccggggtctccccacgcccaccgcccgctttgagcaaaggaccttcagcgtcatcaagatcttccctgacctcagcagcaacgacatgctcctcttcatcgtgaagggcatcaacttgcccacacccccaggactgtcccctggcgatctggatgtctttgttcggtttgacttcccctatcccaacgtggaagaagctcagaaagacaagaccagtgtgatcaagaacacagactcccctgagttcaaggagcagttcaaactctgcatcaaccgcagccaccgtggcttccgaagggccatccagaccaagggcatcaagttcgaagtggttcacaagggggggctgttcaagactgaccgggtgctggggacagcccagctgaagctggatgcactggagatagcatgtgaggtccgggagatccttgaggtcctggatggtcgccggcccacaggggggcgactggaggtaatggtccggattcgggagccactgacagcccagcagttggagaygacgacagagaggtggctggtcattgaccctgtgccggcagctgtgcccacacaggttgctgggcccaaagggaaggcccctcctgtgcctgcccctgcaagggagtcagggaacagatcagcccggcccctgcatagcctcagtgtgctggcgtttgaccaagagcgtctggagcggaagatcctggccctcaggcaggcgcggcggccggtgcccccagaagtggcccagcagtaccaggacatcatgcaacgcagccagtggcagagggcacagctggagcaggggggtgtgggcatccgacgggaatacgcagcccagctggagcggcagctgcagttctacacggaggctgcccggcgcctgggcaacgatggcagcagggatgctgcaaaggaggcgctctataggcggaatctggtagagagtgagctgcagcggctccgcaggtgaggagcccatggggcgggcagccccagaaagcgggcagcaggccccgataccgggaagagccgacacagccacgaaccagacaagcagacaatcagcggacaatcggttctggactcacccctcatccgggcccccagccccgccagagcctccgtggctgcgggtgttgggaaccatgcctgccagccagtatgtgcccctcacccaggcctggctgggccctggagagtcctgtttgcacagcccaggggtgtccggcctctggcccgccccggagcagggagggtggctggggccaagccccgagggcccctgcaagcactttacttcctgttcctccccagccttaaccccaaagccctcctgcaccccaaagaagccactgaggctggccgagccacactgtctccccaggggcgtcgacctggcccagctgggtccccagggccagcacatggaataaaatagccagggccacactcaaaaaaaaaaaaaaaaaaaaaaaaaaaaaa

SEQ ID NO: 239 - DNA, 4657 bp, Homo sapiens
  SITE (155): n equals a,t,g, or c
  SITE (188): n equals a,t,g, or c
gatatagggtcaaagtcagaccctttatgtgtgtggttttgaatacaagtggtcacagtgggtatgaggttgagcgcacagaaggattaagaattgcttgaatcccaattttccaagacatttattattgattactactttgaagtggttcaganattgaaatttggggtttatgacatcgacaacanaactattgagctgagtgatgatgacttcttaggggaatgtgaatgtaccctkggacaaattgtttccagcaagaagctaactcgaccactggtgatgaaaactggcagacctgcaggaaaagggagcattacgatttcagctgaagaaataaaagataatagagtggtcttgtttgaaatggaagccagaaaactggataataaggatctatttggaaagtcagacccatacctggaattccacaagcagacatctgatggaaactggctaatggttcatcggacagaggttgttaaaaacaacttgaatcctgtttggaggcctttcaagatctctcttaactcactgtgttacggagatatggacaaaaccattaaggtggagtgttatgattatgacaatgatgggtcacatgatctcattggaacatttcagaccaccatgacaaaactgaaagaagcctccagaagctcacctgttgaatttgaatgcataaatgagaaaaaaaggcaaaaraaaaaaagctacaagaattcaggtgttatcagtgtgaaacagtgtgagattacagtagaatgcacattccttgactatataatgggaggatgtcagctgaattttactgtgggagtggacttcactggctccaatggtgacccaaggtctccagactcccttcattacatcagccccaatggcgttaatgagtatttgactgctctctggtctgtgggactggtcattcaagattatgatgctgataagatgtttccagcttttggttttggcgctcagatacctcctcagtggcaggtatcacatgaatttccaatgaacttcaacccatccaatccctactgcaatggaatccaaggcattgtagaggcgtatcggtcttgtcttcctcagataaaactctatggaccaactaatttttctccaatcataaatcacgtggccaggtttgctgctgcagccacgcaacagcagacagcttctcaatatttwgtgcttttgattattactgatggtgtgatcacagaccttgatgaaaccagacaagctatagttaatgcctccagctgcctatgtccatcataattgttggagttggaggtgctgacttcagcgccatggagtttctggatggtgatggtggaagtctccgctccccattgggcgaagtggccatcagagatattgtccagtttgtgcctttcagacagttccagaatgctccaaaagaagcacttgctcagtgtgtcttggcagagattccccagcaggtggtgggctacttcaatacatacaaactccttcctcccaagaacccagccacgaaacaacagaagcagtgaccacttcaacagaattcttttgtgttctgtggagcaatgccatctctcaccccaaatcgtgtatctgtcattctacgtactttttaccctcagcatttatgatgtaaatctctttctctatggattatatctgtttaaagcattctttctaggttattttggggggacagtgccaagtccatctttgcccagtcaattcagtgattgatagcaatttacattaattgcagtaaagctctttggattagaaattagtgtggggaaagcttattctgttgttgtttttgtttactttcatatgatgaaaatgctgtgtttaagtgtttgtcaataggaagaatggaaaactgttgggatgatgtggtttgcaggttgctgtgcctgattcacagtgtatgttgtataagccartgtccatacctgattatgagagcttcttaaattatatgatatcaaatttgttcctgtaactctgtatacagtgcttttctgcaaggtaaaaataacctgtctatgcatctgatttttgctacagtttagacactgtggtttacaaaacagcatgcactcaacttgggactttatgaaaagtactgaatgagcaggaaaaggcacatactcagttttttaaatgtacaatcaacaagtaaaaataacctcatgtaagtaagccatttttatttgcctttctagatattttattttattgtggaaaactgtaaacatggtcagatttggctttttttttcattaactgagcaagactttcaggatattgtagatgcacagatggtaggttgtcctgaattctacattattagattactttaattgagatttgttaaaacggttaggactgttttgtccaggaaagataagaggaccaaacatataaggtgaaattcagaattccgtttccttctaactaatgaaaaactgcttactaaaaaaaaattttatactttccttgctaaggtcccatatattgatttgtacagatccacttagtcattttctcctttttttaagaaccattttcatctgatttttaaactcacgataccagttatctgttaatcaaaattgcattttacaatttaataatgtgatatttcctatgtctacagcataccttattaggtataaaacctactgcaacttagaaaaaggaaagaaaaaagaaaacttttccaactgctgcattaagatagggtggattttatgtgctttttttttaagagttgaatttcttttcctgacttttaccttttacagcgtattacttastgaacattacattttcagaatagatcctaatattttattgagggcctatgtgctaaaaactatgcatatctatatattggccaattatctttaataatttaccttttgaaattgcatgtttatcatatatccttaagtggacacatacagtgccatgttgatgtgcctctcagttttattgaaaagctgccccacagcccatgtctcttgttctctgcaatgcctcaagggagtgagctctcaaccacagatagctgtggcttctcagaagcagctcattgccaaggccaggctgagaggggacctgcttgctgtggtggttgcctagcccagatgagcatttacctaccaccttcccacttggctagctgtcctttggatatgtgctgttaactggggaaggcatctaactagtagcctgctactccatagtatggctcaatagatgacacatcattttgacattatcaataggagaaaagaaaactaacccttcttctgattgtttggagccatagttgtctcagatgttctaattctctttgtatgcttggaaacagcatagatatgttgctgtggttttcagaattttctcttttaatcacaagaagccttttaaaaaatgacttacacatattctcaatgtacagtaaaacagacagaagtgagcttatctgtttgatgctgtggcagggtcccagtcactgggcatatcctccttctccttaaccagctcctcagcagcccctgagtcacctgcacaaggtgcttgggaactgctggttatgagcattcctggttttcttcagccaaataacaggtaatcactgtcaattggatttggtcttcattattttatattctgattttatcagaattattctattttaaaattgttttaaaatttaaaaacatttaattcatgatcatgttcatcagtagatgctattattcataagaactgtgattccagcaaactagggtaattggtgcctttttacagttttgaataaaagcatttacaatttctaaattatcagttttcacagtttcagcactcaacctcatcatacgctgatttaatattgttttacattaaaatagtccttttccctgttgtgccaccattcatttaagtgctgtttgttcttaaaatgcatttaaagaaaaattacccatattgactttcacacytcatataatcagatctattacaaatatatatcggagtgacggtgcccaggatagatgtaatatttcttacagatgctggcacagaggaaataatataccagctaatctagtcacctaaccttgtggttagaattgcaattttaagaccagaaaaatttgaagtctgatcagagatttacaactgttcattatagtggtgccttaggcaatctttccaaagtaaattcagggccccattgctacttatgccatatttggacatactttttttttcttcaattttgtaaacttcctggaaagctgtcttcactaagtatcccctagtctctatatatgtggttagtagtcatggaaatgacacataaagtacgccagaagtttgatggaacgtgttagaaactgttttgtgcttttatggatgtcatacttgacaatacatgtgtaagttactaatatatgaattgatgctaaatatatcttacatttgaattccttttggataaagttatttcttgatgtgacasagtagtgtgttttcatttttattctttacatgtgaccaaaacaatagaaaagttaaaaataaaatatagtgttttaggtggcaaaaaaaaaaaaaaaaaaaaaaa

SEQ ID NO: 240 - DNA, 482 bp, Homo sapiens
  SITE (472): n equals a,t,g, or c
  SITE (478): n equals a,t,g, or c
  SITE (481): n equals a,t,g, or c
agaaattcatagatactcaaacctcacagagtcgttcctccaaagatgccgtgggtcaratatctgttcatgtggacatcactgccaccccaggaacgggagatcataaagtcactgtaaaagtgattgctattaatgacctaaactggcagaccacagcaatgttccgcccctttgtggaagtttgtatactgggacccaaccttggagacaagaagagaaaacaaggcacaaaaacaaaaagcaacacatggtcaccaaagtacaatgaaacatttcagttcattytcggaaaggaaaatcggccaggggyttatgaacttcatctctcagttaaggrttactgctttgccagagaagatcgaattatcggaatgacagtcattcagctacagaacatagcagaaaagggaagctatggggcatggtattcttctgaaaaatatctctatggattgaaactggtttggantatccntana

SEQ ID NO: 241 - DNA, 826 bp, Homo sapiens
gagctggtggcctgtccccgmctggtgggggctggggctgctgcgggagagtcctgtcctgatgctccccgygsyccccaaacatcgtcccagaggacagcagccaaagagcctcctggctcagagccgtcagctttcgcrttcctgaacgcctgacccratggcctggccctggagtcttcagcttcagctkctgkctggggcggtctgtgcttcctgagcagcctcaaccgtagctgctacagtctccaggcagcttgacttgagaggacgaccctagggctacctcagtttcccccatctcctctgccagaggctctggctatttggacttgaatccctacgagggatggcaggtggcagggcttcagaaatgtcgatctcagggctctcagggggcagtccctgcctgtcttgcyctcagacatgaggtttcttgtatgaatgcggaagcgactaccaggttccttatttcattttgatctcagctccctccttccccaggaggtcatgagcagcaacaagccactgctcccccgtcccatcggggtgggctaggtgctgaggctgggtttggtgcatgtgggttgagggtgtcttgtccgggctgccttgtgctgtctggcctgaggccatttcaagtctcagatccctacgtgatccttccctggctctcacctgctcctttaggctgtaattgcttcctacacacgaagcctctgattggagcctctggtccatctcagaaaaaccttccaagagcgctggggtttatgctttctgaataaacactactgtttacatgaaaaaaaaaaaaaaaaaaggg

SEQ ID NO: 242 - DNA, 3945 bp, Homo sapiens
  SITE (463): n equals a,t,g, or c
gatttgctattaaacttcaaaatctacaaactgtaagacttgtatttaagattcaaacccagactcccaggaagaaaaccattggagaatgctcaatgtcactcagaacccttagcacacaggaaatggattactctttggatataacaccaccttcaaaaatttctgtttgccatgcagaacttgaattggggacttgttttcaagcagtaaatagcagaattcagttacaaattcttgaggcacggtaccttccaagctcatcaacacctctgactttgagttttttcgtgaaggtgggaatgtttagctcgggagagttgatttataagaaaaagacacgcttactgaaggcctccaatggaagagtcaagtggggagagactatgatttttccactyatacagagtgaaaaagaaattgtttttctcattaagctttacagtcgaagctckgtaagaangaaaacactttgtggggccagattkggataagtgaagacagtaataacattgaagcagtgaaccagtggaaagagacagtaataaatccagaaaaggttgttatcaggtggcacaaattaaatccatcttgaagacttcacacattaatttggtgaagaacttgacattcttttagaagacttatgatttcaatttgctaccaatgagaagaggcaaatcaacaaatttgtcaatttatgggggctataattatggtatataatgtatctgatagaaaatttgataagaaaatgtaatgaattttatcagatatccaaagtaaaggaaatgttttaaaactgcaacaagagacacagacagtaaaatcaaagtattattaggatgactaaataaattataaagtctgtgagaatatcaaccatagatagttctttctatattatgtttttgcttttgtattttaagctttacttagatattcaaaacctggtatatcaagtctctgttagtactattggcatttagaagactttaccattatttcagtgctaggcattattgattaggtcttggctccactgtttacctcttgctatgtattttctcccggtaaaaatgaattgrrccatttcaactattttctatatttggagaaagtttgtgccctgtgttttataatttttttacccataagacatcacattatccctttgtaagctacttatctccaaaaaacttcagaaatagaaaactacattttggcaggaataattgaaaacaccagaaggttgaagtttaattggaaacccagaatatacatactttgctgttttcttccctcaaatattttactatttgttttatttggagttaaaataagagtatcatccatatggtccatcctaattcacagaattaaatgagcttaaatagaaaattcagtattttatgataatcacttcgtttttagtttttaaaatttagattattctataatttaccgtgtttgagtattttctcatttttttcataaccatacctgattatactgtgtaacaaatattttctattgcagttttctttccagtacttattagaactcagtatttggaaataatttcagcttaattgaccataagaactgtggccaaaaagaacagttttttggagaggcagatgacattatacctgattttagaaaatctcactttatttttgctaataagtagactaagtgctctgtgttctcagtcttccctttttttctgcccccattcttactttgtcccaggcatgcagagaaagatggtgatattttaggccaggagtataccttgctataacctaagcatgccttctttattccagctcctatgttctgtgtatatcattaacattttcccaaatraacacttaattctcttttccctaggtgccatctcctcaagctacaaaatgtccacatcttatatcccctttgcttctactgctctgattttgtggtaccagtactctctgccactgaacatttwgaaatatttttgttttagatttgcaaaaaatgacatataggtcagtactcacatggatttttaagataaatcacctgtgtgataatattttgaatctgagacgaatacaacttttaaaaattgtttttaaaaatagacttttttttttagagcagttgtaggttaacagaaaaattgagaggaagatagagatttcctttctcccctgacaaagccctcaacagcctcccaggctatcagtatcctgcaccacaatggtacatttgttacaatcaatgaacctactctgaaacatcattatcatccaaagttcatggtttacattagagtcccctcttggtgttatacatgctagaggacaaatatatgatgatatgtatgcatcattataatatagtatagtttcgctgccctaaacatcctctgcaaatgcaactattttaatgggtaccaaagaagtaaatgtatttactggcttttagataataaataacgggctttattgtttattttaaaagctacaatttgttttagctggtttctctgttctattaatgctttgaatttccaaatttaatatatgtagtcatgcatttaacttaatatttaattatttgatttatttaattttctatattcttacaatgtatgtatgatgtataatttaagggaaagctatgacttctcagtttcttagaatcctaggtaaataaaacaataaaaagaaaacccttacatttaaaagagctttcaggtacagaagtattgatacaactaagatcctaaatgttttaattagtgtttacttaagcctttttcaggtgaggaggtactaatgctggttatttccttgaagctttatgtggacctataaataaaaatccaatctcctgctaataggtatgcatattgtgagaaaaacgttaggagctggtagtaaaaaatgagattctatgccaaaataacttctcttcatatttgcctaggcatttcttgacctttacccacttacgcaaggagaaggaaatcataatgatgtcatgtgatcaaaggaaaccatggaagggttcacgctgatagctgatagcttttacagtgctcattcctaacagtggatttacttgtaagctttcagatcaacacaaatagctgcagcctgggttaaaatataacatcactatttggcttttgttttgcatgatttttaaaagcagtactcctagggaaatggcctctgaagtatatcagtttcatctcttaccaagactgttaagaagaaactagtgggattttgaacaagttatataattgtggtctgaaaagaccctaaactgaagttctgtttaaatatagttacatgaatttctctgatactaatgtactcaacagccaggtataaactatatctcctagtaacattttccatttttgtttaatcaaatacttgcttatgaaggatttcagaaatttgtaataaatgtcagcttttgatagcatagcagtaattgacatttcaaaaatatatatttctttctgtgtttggttgggtgtaatgaggaaaatacctgataaaatgtctgaagacactttctaatgttatcttggtgcataagctgtaatttttattcaaaattaaatttcaaatgtttgcagttttggctaaaacattgagttgaaagaattatgaaaagtgggcccatatgaagtaccatgttcattttgaaatatagatttaagatttagaaatatattaaaagagttaatggagcctcctaaattggattttattttgtgggtgaagaattgtaggaagatgaatgtggcctacagttttagtaatctcctagtggagttttttttaacttagtacttttttatttttaagttttttaatctataaaaaatgtgatttctataaaccatgattacaataaataattatattaaaa

SEQ ID NO: 243 - DNA, 496 bp, Homo sapiens
  SITE (20): n equals a,t,g, or c
  SITE (71): n equals a,t,g, or c
  SITE (85): n equals a,t,g, or c
  SITE (451): n equals a,t,g, or c
  SITE (452): n equals a,t,g, or c
  SITE (488): n equals a,t,g, or c
  SITE (489): n equals a,t,g, or c
taccccgttgaccttcgccntaacaccgagattttccgggggcttggcaccgggcgacgcactttcccagntcgccatctttganaagaggcaggggctggcctgggcggagtgcggggccgacatctgcggagggttaggaggggaaaggttttttctacccccggctcggcgaccaggctgaaactyatgtttgaatttagtgagccgtttgttcgttagtccggaacactagcgcggtaggccaagctgcgaggaggcggcgaaatcagcgaatagcaaattataaaagaaacaaggctttatctcctaggccctctaaagcatccccaggagatccgtatccccgttttggagagaacgtgaagctcagaaaaactcagtggaaagcggcagacccaagcctcctcgccaagtctgagtgaccgtgaagccctggtttttccttctnnttcttctttgtgtactttttttttttttgggaaaanngggtttt

SEQ ID NO: 244 - DNA, 531 bp, Homo sapiens
  SITE (509): n equals a,t,g, or c
  SITE (525): n equals a,t,g, or c
  SITE (531): n equals a,t,g, or c
gtcaaatccactttcaccagctccctaatatctgagtgtttctggcattttatcataatctcacaaccacactgtgcagtgcgtgctgtgaatcctggtttaccgggaagaaaacagacttgtcctgggtggtgtgtgctggtaaatagtggagccaggtggaaattccagatatggatgtattgggaagccccgctagcattcgctctgccgggcatctctagcagtgagagatgagtgcttagtgacgccgagcagatctcaggtggacacagattcagyttgaactccttgggtaccacatggtgagaaaggttttctctctccaattctctttcaaccagagagaaattctcaaaatggcactaacgcatctttaactccataacacttgctagtgtttattttccaccgaaccagcggggaacaacctttcacacaaagagcctttgggcagaaaacagggtctggtaaaattaaacctggtttggtttccaggaataaccttncaggggtcccccctangggggn

SEQ ID NO: 245 - DNA, 375 bp, Homo sapiens
  SITE (345): n equals a,t,g, or c
  SITE (367): n equals a,t,g, or c
ggcacgagggaactttcagcccagcgtttctgcaatgcagagtgaagtggatactgggcagttcgagacaggtttttaatcataagtggtcttttcaaatgtccatcaattgatggggaaggctggcacccaccaagaagtggaagtcctcagaaattctcggcacaccctagagtattgtacaaccaacacccccacataactttgtcccctcttccccaacaacccagagcaggtgttgcagacaggagggccacagcgtgtggaagtaaagactttggrggctaggagatgcctttttccagcaatgrttrttgayttcaccacacccttgcctggcctggnctgaggttcagcatggcatganttttctag

SEQ ID NO: 246 - DNA, 287 bp, Homo sapiens
  SITE (95): n equals a,t,g, or c
ggagatactgctgggtgcgtacgaggcggacagcgcaagtgttcccttgggatttggtaacgtggaggttgttggcaactttgacaagaggactnccagcaaagtgggttgaagatgggaggtgagaaagagatagtgatggtggacaaatggtctttttgagaagtttcactgagaatgggatggggacgtgctgwaaccgkgggttcagkggagagtttttaaagakgagagagcatgcctgagtgcttgtgggaggcgtggcagatgcctggagcaaagtcctg

SEQ ID NO: 247 - DNA, 326 bp, Homo sapiens
ccctgcccaaaaaggggcggcgcaagtctcagcccaccgtgccagacgccggaatggcagcagaaaatgtcctgaccccctcacctccactcagagcccacctgtcccgcccatctcttagaaactgcaggagcagccacggccgggccgccggggatctsgcggactaagggctgggtcagagccgcgcaaacatgggctcgctcgtagtcctggcgagcagcactcccaggcaagtcgccgasggcttgcagggcacccagaaaatgtcactgccggcgaagtgaccccgagccgggccacgggacccctcacacctcaccctt

SEQ ID NO: 248 - DNA, 453 bp, Homo sapiens
  SITE (336): n equals a,t,g, or c
  SITE (377): n equals a,t,g, or c
  SITE (412): n equals a,t,g, or c
  SITE (418): n equals a,t,g, or c
atattctccagcaagccgggsccgagagctgccaacgaggcctcggttgaatacctgcaagaggtggcccggatccgcctctgcctcgacagactgcagatttcctctcggagcctgagggaggccagagatggccaaggagaagcagtgctacctgcagcaagtcaagcagttctgtatccgggtggagaacgactggcaccgggtgtacctggtgcggaactcagcagccagcgggggatggagttcgtgcagggcctctccaagcccggccgcccgcaccagtgggtgtttcccaaggacgttgtcaagcagcaagggctgcggcaagaccanccaggccagatggataagtaacttggtgtaacggcgatgantacaaggtctccgtgatgctgtggccaaagtgtcntcgatncaaccattgggcttaagattgtctgaagcttcaaa

SEQ ID NO: 249 - DNA, 1916 bp, Homo sapiens
  SITE (1255): n equals a,t,g, or c
ttctttttaaaatgttaatgcccgttgtctttcctgggctgtttgctagcggaaggatgccagggaagccagcaggagctaggagagagtccgtggatctcgaaagaaatatgggagacagatgcccggcggtgcgtctggagatggggacggcgggagttgagttgtggcagtagtygagttgtaatttgtgggcggaggcagkaggagactccccacccttcacccctgccccactctgtccccagttccgccatttgtgaggccagaggtttccggactgttggcctcgcaggcagccgtctcccgccccagggcatcccccagtccctcccgcctccacgagagcctggagctctcagcctcgcccggggctccactctctcctccggctccctgggctgttttgctctaacgatcttgccagatccctccctctgtagacaaccaccaacctctgtttgctgttgaattctctcctcacattacccaggtctgctcaagacatgattttggttttggtttctgagggttctagtgggcagaaggttggagggacacttatgagggtggccgggggtctgacgctgcactttggaaaaactcacacagttgaatttccaaagaaatctgccctttgccctctttgcacctttgatacattctggaagttttctcaggctttggacacttctggggatggaggtgtggagaagtggggagttccctctcttcatagtaaataactctgaaatatgtgaatgtgaatggcaggagaatctggccaaggatggggccgaaaagggtggttctaattgtttgcttctgatgttgagtctttagctgaccccacaggcaggtttccaaggtgcaaagagatctttcccgagtcagcggccccatcctcatcctccctccctttacttcctcactgtgcagtctccctcaaggatctactgtgaaaggtgtgtttgtagtgatatccaacctaactcagtaacgaagtcgttacttagctcttagctgtgaaataactctggaaacttccccaccccaaccataaattcttacttataaagaaacaggtccccaaactggaaacagcttagtccaggcctcagcgagaaggaaggacaccatgactgctccatgctgggcacagccgggcagtcttgccaagtgcctgctggaggctgtgccggcaagaggcctgcagcaaggagattcccttccctcgggccattatcaatactknctttatctggaggtggggaagcgcagccctctgagacagcaggacaatggtcagttcagagagggtgagggcagcaaacgcttcagaggacacagaagccagaggacccccccccgccccacagctgggtcagcctggaaaatccatctattagggactttttggcagccagatggcagcaatagcccattaggtctcatcccgagttccaagtcttggctgcaaatgagcctcagttcgccttactggagagcacccccagattcctgggcacagttcatttccagccctttctagatctgatcttttagggggaaagacagcttaaaatgttcttttcattttaaagaaaattattctgtctgcttaagttggaggctacttactctttcacctgacattttctttccttttattcttccagatcaggaatgaaatttccatgctgctcataaagataatattattgtactaattatttttattaccattgtaattatgatcattatgttgatattttagtcagggttttaaatgcacatttattccaagtatctttgtgttttctctttaatatttaaacttattctctctgtgagtatataagtagactggagggacatccagatgtccagttttgtcaggcaaaaaaaaaaaggaa

SEQ ID NO: 250 - DNA, 553 bp, Homo sapiens
  SITE (537): n equals a,t,g, or c
gctcgctaagcaagggaacgctcttaaagctttcagtttggytactctaattttattatttctctaacctctctaatcagcagagtgattgaggctctgattgtgagtcctgkttttatttttcacactatttttatactttgaagctgtggttttaaaatatacactcaaaaatgttggctcggcacccacgaggcccaggaggttgtccagatgcactgggtctggggctgctcccagcasyctttcagtgcccccgcccccaccgctggcctttggggatagatggaatgggcaggagttgctgtaagagactggtccaaccacaggcaagcttctggccaaatattttaaattcgactctgagaaactagcaggaatcttgttctggtggcttcccaagcacacactcagggatcaggaacctgcagaagcaggaatttcccagtttcagataaaatgktcattcatctccaatatgcagttgytgggttccccatcgccttccmtccmtgytgaaagtgtgttgcagacggnacttagggaaaaacag

SEQ ID NO: 251 - DNA, 550 bp, Homo sapiens
gtcaaggatcaaggtcccatggtctcagcacctgtcaaggatcaaggtcccatagtcccagcacctgtcaagggtgaaggtcccatagtcccagcacctgtcaaggatgaaggtcccatggtctcagcacctatcaaggatcaagatcccatggtcccagagcatccgaagatgaagagtgccatggccacagcacccataaagaatcaaggttccatggtctctgagcctgtaaagaatcaaggtttagtggtctcagggccagtcaaggatcaagatgttgtagtcccagagcatgcaaaggttcacgattctccagttgtggcacctgtaaaaratcaaggtcctgtggtccccgagtccgtkaagaatcaagaccccattctcccagtactagttaaggatcaaggccccacagtcctacagcctccaaagaatcaaggtcgtatagtccctgaacctctgaagaatcaagttcctatagtcccagtgcctctgaaggatcaagatcctctggtggccattaccagcaaaggaccaaggttctgca

SEQ ID NO: 252 - DNA, 202 bp, Homo sapiens
cgtgcccgctgaaggcccacattttcattttgtgctgagacttgtaaattaggtagctggtcctggctgtagcagatggtatagattctttttctggctctgtttttgtracatctcaacttactgggctcttattaaaggtgatttaggtgacttatcaacttttcatgagtacagatgaagaactcttctagggcagggg

SEQ ID NO: 253 - DNA, 618 bp, Homo sapiens; identical to SEQ ID NO: 147
  SITE (350): n equals a,t,g, or c
  SITE (569): n equals a,t,g, or c

SEQ ID NO: 254 - DNA, 358 bp, Homo sapiens
  SITE (304): n equals a,t,g, or c
  SITE (329): n equals a,t,g, or c
gcggaacagatcggaacaatcggaatgacgttgtggatcagaccgtgttcttcgatgttctgttcagcaaccgccagcgcgtctggagagatatccaccgcgtcgacttctgcatccgggaaggcataagcacaggcaatggcgatgcagccgctaccagtacacatatctaaaatatgctgcggttgcttgctgataagtccggcaaatttattgttgatcagttcaccaatcggcgagcgcggcaccagcacgsgtttcatcgacgtaaaatycatggccgcagaaccacgctttgttggtncaggtwaagccaccggaatgcgttncattgamgcggcggatcagstttcaacaa

SEQ ID NO: 255 - DNA, 521 bp, Homo sapiens
  SITE (422): n equals a,t,g, or c
aaaatgtcagaggaggtcagggcggacacaggaggaggaagaggagaaggaggggaaggaggagaaggaggagggggagatggtggaacagggagaagaggaggcaggagaggaggaagaagaggagcaggaccagaaggaagtggaagcggaactctgtcgccccttgttggtgtgtcccctggagggcctgagggcgtacggggcagggaatgctttctcagggtcacttctgcccacctgtttgaggtggaactccaagcagctcgcaccttggagcgactggagctccagagtctggaggcagctgagatagagccggagcccaggcccagaggtcgcccaggcccacgggctcagatctgctccctggagcccccatcctcagtctgcgcttctcctacatctgccctgaccggcanttgcgtcgctatttggtgctggagcctgatgcccacgcaatgtccaggagctgcttgccgtgttgaccccagtcaccaatgtggcttcgggaacagctt

SEQ ID NO: 256 - DNA, 450 bp, Homo sapiens
  SITE (339): n equals a,t,g, or c
  SITE (379): n equals a,t,g, or c
  SITE (382): n equals a,t,g, or c
  SITE (398): n equals a,t,g, or c
ggagtttccaacagggaacttgacccgttagcagccgcagccatggcggcgcgttcgcctccctcaccgcacccttcgcccccagcgcgacagytggkccccaggtccccacgtgttgggcggggagctgaagtacacgcaatgcgcacgaggcctcgggttttgccggcgcacrcgggaggtggtcgcggacgaaagtgataaaatctgggtgggtgaagaagggtcagggggccgkcgakggcctgggggggcagctccggctcatgctcccctcctcagcgcgcccatggggtccagacggctagagggcatctcggtagaggaggcgatggtganccggacgcagctgctggaggaagagctgagcagcctaaangangagttggccctgtgtnaagctgataaagaatttgtatggtctttgtggaaacgtctccaggttacaaa

SEQ ID NO: 257 - DNA, 705 bp, Homo sapiens
  SITE (32): n equals a,t,g, or c
  SITE (37): n equals a,t,g, or c
  SITE (48): n equals a,t,g, or c
  SITE (55): n equals a,t,g, or c
aaagttttcgggcccacggtacggggagaggnacccnggtggggcccnaagcccngttagagtatttagggtagagtattggagagtgccttcagagtatgggagtatttttgaaaattcaaaattatacagcaccccaacaaagtaaaattcacaatgttgggcatctactcaaagattacccagacaagcaaagaagcaaaataagatgaaaatcagtaaaaccaacccacactgacagatgccagaattagcagacaaaaacattaaaacagttataactgtttaagatgcttaacaagttgagatatggaaggtataaaaaaggcccaagtcaaacttctagagatgaaaaccacagtgtctgatggaattaacaaaggatgaaattagcagatgattaaatactgagtgagctttggatggaattaacaaaggaattaacaaaggatgttaattaacatgtgtctgatggaattatcaaaggatgaaattagcagatgattaaatattgcaaaaaacgtatatttgaatttgagggcatagaggtggaaaatattcaaaatgaaacatggaaagaaaaagtaattttttataagtgaagagtatcattaagctgtaggacaatttcaagtggcctaatatggatataattggtgtccttgaagggacacagaagaaaaagggacaaaaatgagaaaaaaa

SEQ ID NO: 258 - DNA, 626 bp, Homo sapiens
  SITE (7): n equals a,t,g, or c
  SITE (589): n equals a,t,g, or c
  SITE (596): n equals a,t,g, or c
cgctgtncagggttagtgctgggtctttgcaggaattggctctgctgacaggaattataagtaaagcagcacttcctggaatattaagtgaacttgacgttgatgtaaatgaagggtctctaatggagctacagggacatattggaagattccagcgccagtgcttaggactactaagtcgctttggtggctctgacagactgcgtcagtttaaatttcaagacgataatgtggagggagataaagtaagcaagaaagatgagattgaactggctatgcagcagatttgtgccaatgtaatggaatattgccagtcactcatgttacagagttcccctaccttccagcatgctgtgtgtctcttcactcctagcctttcagaaacagttaatagagatggaccgcggcaagatacccaagctccagtggttccatactggcgcctgcctggtttaggcattatcatctacctgctgaaacagagtgctaatgatttcttcagctattatgacagtcatcgacagagtgtcagcaagctacmaaatgtagagcagcttccccagatgagataaaagagttgtgtcagtcngtgatgnctgctggtgttgataaaatctccactgccc

SEQ ID NO: 259 - DNA, 400 bp, Homo sapiens
  SITE (384): n equals a,t,g, or c
  SITE (399): n equals a,t,g, or c
tcgacccacgcgtccgctctctctctcaggaacacaagatgccgaagggaagaaggcgaagggaagaaggtggccccggcccccgccktcgtgaagaagcaggaggccaagaargtggtcaacccgctgttcgagaagcggcccaagaacttcggcatcggtcaggacatccagcccaagcgggacctgacgcgcttcgtcaagtggccgcgctacatccggctgcagcggcagcgcgatcctctacaagcggctgaaggtgccgcccgccatcaaccagttcacgcaggcgctggaccgccagacggccacgcagctgctgaagtggcgcacaagtaccggcccgagacgaagcaggagaagaagcagcggttgtttgcccgngcggagaagaaagcng

SEQ ID NO: 260 - DNA, 520 bp, Homo sapiens
  SITE (202): n equals a,t,g, or c
  SITE (514): n equals a,t,g, or c
tttttttttttttgcaaaatgtccttgatggtcataatggtgtattttttaaaaattccagttgtttttgtaagttttcttatatcccatcttacattcaattccccctgcaaacctcccactaggtaaaccacttcccgctctattctttgtcttgagactgacttctaggaaggctgtccacagctgcctcaggccgaangtaactaggagaatattaggtcgtgtgcttggattcctgttctccaaacgattctaattaaaactagtccactacccccaccaacacgttcagaaggaaaaaaatgtagcagaatccccaaatgccctcatcacttcattataccatttgggtagctttatggcacctgtaggactagttcatgccaggcccatttgtaactgttttctctagttaaacatgatattgccattaacagcacattaaataggrttacactgcttargaatctaggawtttctcaatatwtgrgraaatgtggaaagcacgggntaatag

SEQ ID NO: 261 - DNA, 503 bp, Homo sapiens
  SITE (461): n equals a,t,g, or c
  SITE (465): n equals a,t,g, or c
  SITE (478): n equals a,t,g, or c
cggtcaatggcctgcagaagcccccggctcttcttgctccaagaagcttctgttacctgggtgggatctcctaaggggcagcttaagaaagatgcctggggagtcccatgaagagtcaggggtgagaagccctgtcctgggcagctctgaccaacaccccatcctcaggtgaccacggtcaagttctggtttgctactggtggggccgggttctgcctcagcagaggccttgccctcaagatgagcccatgggccaggtgagtgggggtccagctgcccgggctgggaggcggaggctgagacctgaaagttgcttgaccggccttcccccagcctggggcagttcatgagcacagttggagcaggtgcggttgccggrtgattgcacaattggttaaawcgtgggaggggttctggggcgsccggctgttgcaaagtccctttttccattttgaactggngaanctggaagaggttncccgcccggaaaactttttccagga

SEQ ID NO: 262 - DNA, 866 bp, Homo sapiens
  SITE (694): n equals a,t,g, or c
  SITE (695): n equals a,t,g, or c
  SITE (784): n equals a,t,g, or c
  SITE (851): n equals a,t,g, or c
  SITE (863): n equals a,t,g, or c
acctgctctccagcttctcacccagccaggacgtctacctggggcggccagcctggaccaccccattgaggccaccgagagggtccagggtggcagaactgtgagtgtcggagcagacgccatcggagcagacgccttccttgacaccagcccgggaggcacagcagagggcgtggaaagctggcttgagaagggcatagggttgggggcccaagctgatccacccaggtggtttgcatgtggtgtttcaggagcaggccaggaggccctcaccgtactgggcagagagggggtgtctgggccaggtggggagggtctggaggctacggstcaatggcctgcagaagcccccggctcttyttgctccaagaagcttctgttacctgggtgggatctcctaaggggcagcttaagaaagatgcctggggagtcccatgaagagtcaggggtgagaagccctgtcctgggcagctctgaccamcaccccatcytcaggtgaccacggtcaagttctggtttgstactggtggggccgggttctgcctcagcagaggccttgccctcaagatgagcccatgggccagcctgggcagcttcatgagcacagctgagcaggtgcggctgccggatgactgcacagttggctacatcgtggaggggctcctgggcgcccgcctgctgcacagccccctcnnccactctcacctggagaacctgcagaggctgccgcccgacaccctgctccagcagttaccttgaagccatgggggtcctgagaaaccanataaacgtggtgaacgtggctggaggctttcaagcctgcatcaagaccccacacggtttaaatctantccattgtcttnctg

SEQ ID NO: 263 - DNA, 799 bp, Homo sapiens
  SITE (157): n equals a,t,g, or c
tctttatgccagaacacatcacatggtgatactcacatttatgtagaagtttattgtttgaagttgctttgtggccatactttattgtagttttgggatacagctaatgagtatttggcttttattctgattttatagtctgattatttggccaaancggtttagtagttaaatgagatgatttagtagttaactcacttagtttttaaatgagatgattctccatgtttggactgacttgcactctttagaactgtcattttgttgctctgatttgtgcatctttgctgtgggtcctgatatgacctactgcagggatttaatggattgaaattagagaatatgtttattaatttacaagtggtgactatgtatagtgtgtcatagtggaaacaaagtggatttaaaagcaagaagttcttaattctagtcctgattcaacaacttaccagttccttgagcttagataaataaattacattatctctctgttttagtatccttatctgtagaacagataaacagatacttacctgtctactttatagaatggttatgagaataaaagtgaaatatwgkacaggaaaagtgctttgtrggatataaagcagtataaaaatttaaaatggtgtaggtatcatcgtcgtcatttccccatgccaggtaaaaagaaaatgcaggagtctgggcttgtttacactgagcagcatttctattctggtgctaccatcattaatgcataccggttttaatcagataaaccaagtgtgactgtgtttgcacacttgagtggggcagg

SEQ ID NO: 264 - DNA, 577 bp, Homo sapiens
  SITE (526): n equals a,t,g, or c
  SITE (554): n equals a,t,g, or c
ggcaaaaccacttgcgcccggactcaatgaacttgtcatactccacggacatcttgcagcagagggcctgacgagtgcgcaccgccgagcagttggtgttgatgacacggtcgccgccctggagctcgagctcagggtcgtccccgtcggtgaagataaacgtctgctggcgggcccgggagatccaggtgcgcagcagcagccgcaggcgcggcccgtggttcttccgggtggtcttgacggcgatgaagacgtcgtcaggccgcaggctgggggcagcgggccgggccaggttcggaattcttgcaaaacttattgtccttgtcttcatttagcaacagtggtaagtagttggaaaccaagtatttatgtaagacacacatcacatggtgatactcacatttatgtagaagtttattgtttgaagttgctttgtggccatactttattgtagtttkgggatacagctaatgagtatttggsttttattctgattttatagtctgattatttgggtcaaatcggnttagtaggttaaatgagatgatttagtnggttaactcacttaggtttttaa

SEQ ID NO: 265 - DNA, 1612 bp, Homo sapiens
  SITE (1601): n equals a,t,g, or c
tcgacccacgcgtccgtaacttctttggtgacaaaactgattttcacccactcatggaccagttcatgaatgactacgtggaagaagccaaccgggaaattgagaagtataaccaggagctggaacagcaggagtatcatgacctctttgagctgaagccctagaggaaggctgggcccgtacgtcctgcagaatgtccaccttggagatggacgaacgggtgtcttaacctcagctctgctggaggcctctcccttaaggggctgtctttgttctccttggcctgtgtgggctggcttgagtgcatgttgtctttattccctgtatagcgctgaagagcatcacctgcaccattgattttgggggtcgggggaatactcaaggatgagcagatggggcctgcccgtctacgtgtgcaactggcagtccaggagctctgggtttctgataacaggatctcctttgggctcttgaggttggggagaagcattaggattacacagaggagctactgggacttagaaggaaccctggctgcctgaactgtggccgtgtctgggaggcgaggccacgacaggcctcaagcctcaratgctgctccacgagagccatcttccccagtggagtgcctgcctcccctgctaggcccgtttccctgaaggagctggccgtactggcgtgggcccagtcctgggaggagcagcacagccttgcccaggcccagtccacagagccagcagcttgggttgagatgaatgatgtgttcacaaatgaggggatttcccttctggactaaactgaaggagaggcttgttgctttccagaggtgtgtggctcttaagttgacatcagcttttccccttgtgggtggttctttagctctcctgtcacaccattcgggtgtcctaatgtagggacaagagcaagcctgctgctcaggccccctggcgaggcttcacctcactgtggaagggggcgtcctgcagctggttagtcttaggcctggtggctgatcacttgtggggtcagtctccagcacccagcgctcccacaagccttgccaaggaaggcctgcttttcagccacaaacttcaggaaactcatccccccgctccccaaagtgttgttgctggccctgggcttgtgtggctcctgaggattgggaatttcaaataattgcaatacctgagttagaattccttctaatggcatcgttttaagctggaccataaagcagaggggaattacaagtgtgtcccatgcctgaccttcataattggtttgggggacaggggagtcacagccactgatatttaggtgatgtctcttaggacttcagtgcctcagctgcctgaactgtaaatgttttctgaatttcacatatttttttttgcatgccttaggaagaagcacataggtaaaaccagcagtttccagtaatatagggggtttttgagcaaggcccctggagcagcggagagacaagatggagcacatgtagtctgtgtgcctggtcacacagaggcctgcatgcaagtagcaaagcagctctcaagggcttgtcagtaaaatatattagaaaaaaaaaaaaaaaaaatggngggcccctcgt

SEQ ID NO: 266 - DNA, 607 bp, Homo sapiens
  SITE (545): n equals a,t,g, or c
  SITE (570): n equals a,t,g, or c
  SITE (596): n equals a,t,g, or c
tcgacccacgacgtccggcctcgggtgggccggggttgctgcgccgtcctccactactggctactggcgctgyagccatgcagcccccgcccccgggcccgctgggcgactgcctgcgggactgggaggatctacagcaggacttccagaacatccaggagacccatcggctctaccgcctgaagctggaggagctgaccaaacttcagaacaattgcaccagctccatcacgcggcagaagaagcggctccaggagctggccctcgccctgaagaaatgcaaaccctccctcccagcagaggccgagggggccgcacaggagctggagaaccagatgaaagagcgccaaggcctcttctttgacatggaggcctatttgcctaagaagaatggattgtacctgagcctggttctggggaacgtcaacgtcacgctcctgagcaagcaggctaagtttgcctacaaggacgagtatgagaagttcaagctctacctcaccatcatcctcatcctcatctccttcayttgccgtttcctgttcaanttccagggtggcgtccaccggcgangaccaccatccagcgtgagacaactnggccctctcga

SEQ ID NO: 267 - DNA, 603 bp, Homo sapiens
  SITE (543): n equals a,t,g, or c
  SITE (559): n equals a,t,g, or c
  SITE (579): n equals a,t,g, or c
  SITE (594): n equals a,t,g, or c
  SITE (596): n equals a,t,g, or c
gtaaatatttaaggtggtttactttattttaataatttaatttaccccaaagtccctaaggtaatttattggaggttgaaacatgcattcttgccactgggacaacatgaggcctctaacagcacgggcaggcatggggtcccctgggtggacgaggccgcttggcagccaggtttggagacctggcctcctggtcagctttggagggcccctcaacagagctggagccctgcaccccaacacggctggccatgtggcctcagaacactacttattactcaatgcctggtacttggccagccccagcggtcagtctataaatactcactgacaagtggagggctggacggccatcaccactccccagacgttctccattgcctgtctcatttccctccctccctctgacacctttcttcatgagtcgaacgtggattactaaagctctattaagagtgtggagatcccttcaaggtttccaaatgagaactcacaggaaaaacaggactgaactttgagaatggtggttattcgcaactttgnacataaacctgagtgncttccaacctggcttgggtnttacagccttgcagncntttaaca

SEQ ID NO: 268 - DNA, 325 bp, Homo sapiens
  SITE (280): n equals a,t,g, or c
gaatgaattggarggaaaccgaggcgctgccctggccaggttgctgccccgcacccttccggagcaccgaagtcctgcccggcaacggacttggagctgccgcagagtcagcctgagcccgaggcaggggtcgcgcccggatgcgggtctctgcgccgccccgsgaggcttcctggccttgccctccctgccctttgttgtgtaataagacctgtggcggctccactgagacccacacgtgcaactccgcgcctccgcgttaaaggaggtgaaacgcagnagccctgagaaaccccgagaccccggtgtcctagcagaggcgccc

SEQ ID NO: 269 - DNA, 416 bp, Homo sapiens
  SITE (347): n equals a,t,g, or c
  SITE (380): n equals a,t,g, or c
  SITE (388): n equals a,t,g, or c
tctaatctctgcctccatccttacgcagctttctcccctgtgtttctgtgggtctcaggtctctctctcccttctcaggacacctgccatgtgatttaggacctaccttaaatccaagatgatcccaacttaattacatctgcagagactctttccaaataaggtcacacttccaagttccagagcagtggttagggcttggastatcttttggggcacacttttcaacctactacaaagacaattgtccacttcatagaaaaagagctggtcatatcagcgatggtatagaccarggcccagcaaattctgtctctaaagggccaggtggcttgtgggctctgtangkaagacctttgtagcagraagcagccacagangagacggnaaatggaccaggtaaagctgtgttccgg

SEQ ID NO: 270 - DNA, 481 bp, Homo sapiens
tcgacccacgcgtccggcgccgagcggtggcgtcgttgtcgccccctcctcgtcgggaagaatcgtttggtctcctgccgtgcccggaatcccagtcagaagttccagcctgccactgttctctgatgccatgccagcaccaactcaactgttttttcctctcatccgtaactgtgaactgagcaggatctatggcactgcatgttactgccaccacaaacatctctgttgttcctcatcgtacattcctcagagtcgactgagatacacacctcatccagcatatgctaccttttgcaggccaaaggagaactggtggcagtacacccaaggaaggagatatgcttccacaccacagaaattttacctcacacctycacaagtcaatagcatccttaaagctaatgaatacagtttcaaagtgccagaatttgacggcaraaatgtcagtwctatccttggatttgacagcaatcagctg

SEQ ID NO: 271 - DNA, 562 bp, Homo sapiens
  SITE (418): n equals a,t,g, or c
  SITE (488): n equals a,t,g, or c
  SITE (494): n equals a,t,g, or c
  SITE (541): n equals a,t,g, or c
  SITE (545): n equals a,t,g, or c
ggtgccaccgcggcgcgtgagtttcgccctgtcttgtattaagtctgctcttccaggttcctggcgcttctgtacctgggacttgggatccccacaaacctggaaattctcagccgtcttccttcactcagagcaaattgagacgaccccgtgagaggccgtggttttctcccttagatgccttttatgaacaagattttactagaagacatcactattactggattcttcatgaaagagcactggctgatatttatatcgggctattagctgastggtagtctgcctggtygcaattgcttctatagttgattgaatgctcttaacacggagagacaggataccttcaagtttctccctgttgcagtgggagtaagaagaaagatggtctaattgtttcaagtacacaagcccttgnccattttcctggcaactgcggtaggctgtggcccacagatccaatagagaccagagggtgcttgccagangcctgnacagactttttggggaactgggtactgatgaaacccgaacatggaanttgnttctgggttttaaattc

SEQ ID NO: 272 - DNA, 674 bp, Homo sapiens
  SITE (569): n equals a,t,g, or c
  SITE (584): n equals a,t,g, or c
  SITE (622): n equals a,t,g, or c
  SITE (625): n equals a,t,g, or c
  SITE (670): n equals a,t,g, or c
ctggactctcgggcagagctttgtgagagaaacaaggctggcttcaagtgatctgcaaccagagtaattgggatttgacaaggactgtgaaaggctgactctccctgttctctttcatgctggcaccgggcagagtgtgggaactactgcctcaatacgatcatagaagccattgagatcccgcagtttatcggccgcagttacctgacgtatgacaacccagatatcttgaagagggtgtcaggatcaagatcaaatgtgttcatgaggtttaaaacaactgccaaggatggccttttgctgtggaggggagacagccccatgagacccaacagcgacttcatttccttgggccttcgggatggagccctcgtgttcagctataacctgggcagtggtgtggcatccatcatggtgaatggctccttcaacgatggtcggtggcaccgagttaaggccgttagggatggccagtcaggaaagataaccgtggatgactatggagccagaacaggcaaatccccaggcatgatgcggcagcttaacatcaatggagctctgtatgtggntggaatgaaggaaantgctctgcacactaacaggcaatatatgagaggctcgnggnctggatctctcacttcaccctgccaccgataccacaattcctcgnggaa

SEQ ID NO: 273 - DNA, 2247 bp, Homo sapiens; identical to SEQ ID NO: 168
  SITE (35): n equals a,t,g, or c
  SITE (2123): n equals a,t,g, or c
  SITE (2126): n equals a,t,g, or c
  SITE (2128): n equals a,t,g, or c
  SITE (2193): n equals a,t,g, or c
  SITE (2194): n equals a,t,g, or c
  SITE (2198): n equals a,t,g, or c
  SITE (2233): n equals a,t,g, or c
  SITE (2235): n equals a,t,g, or c

SEQ ID NO: 274 - DNA, 1619 bp, Homo sapiens
gctggaagcagtatcgccgagaagaaagcatctggggttttccaggaaacacaaacgcagacagtgtgtgcactacagactccagcctccctttgaagccaggttcctgcgctttctccctttagcctggaaccccaggggcaggattgggatgcggatcgaagtgtacggatgtgcatataaatctgaggtggtttattttgatggacaaagtgctctgctgtatacacttgataaaaaacctttaaaaccaataagagatgttatttctttgaaatttaaagccatgcagagcaatggaattctacttcacagagaaggacaacatggaaatcacattactctggaattaattaaaggaaagcttgtcttttttcttaattcaggcaatgctaagctgccttccactattgctcctgtgaccctcaccctgggcagcctgctggatgaccagcactggcattccgtcctcatcgagctcctccacacgcaggtcaacttcaccgtggacaaacacactcatcatttccaagcaaagggagattccagtaacttggatcttaattttgagatcagctttgggggaattccgacacccggaagatcgcgggcattcacacgtaaaagctttcatgggtgtttagaaaatctttattataatggagtggatgttaccgaattagccaagaaacacaaaccacagatcctcatgatgggaaatgtgtccttctcatgtccacagccacagactgtccctgtgacttttctgagctccaggagttatctggctctgccaggcaactctggggaggacaaagtgtctgtcacttttcaattttgaacgtggaacagagcaggacatttgcttttcggcgaacttcaacgtggttcagggagtttcgtcctctttcttaaggatggcaagctcaaactgagtctcttccaggcgggacagtcaccaaggaatgtcacagcaggtgctggattaaacgatgggcagtggcactctgtgtccttctctgccaagtggagccatatgaatgtggtggtggacgatgacacagctgttcagcccctggtggctgtgctcattgattcaggtgacacctattattttggaggctgcctgggcaacagctctggctctggatgtaaaagccccctgggaggatttcagggctgcctaaggctcatcaccattggtgacaaagcggtggatcccatcttagtacagcaggggtcctggggagtttcagggacctccagatagactcctgcggcatcacagacagactccgcgtggacggtggtgcggcacggtggccccgacgcggtgaccctccgaggtgcccccagcgggcacccgcgctcggctgtgtccttcgcgtacgcagcgggcgcggggcagctgcgggccgcggtgaacctggcggagcgctgcgagcagcggctggctctgcgctgcgggacagcgcggcgcccggactcacgagatggaaccccactgagctggtgtgttggaagaaccaatgaaacacacacttactggggaggttctctgcctgatgctcaaaagtgtacttgtggattagaggggaacctagttctagatcgcgggc

SEQ ID NO: 275 - DNA, 531 bp, Homo sapiens
  SITE (497): n equals a,t,g, or c
  SITE (517): n equals a,t,g, or c
  SITE (519): n equals a,t,g, or c
acggcccatatgyggctggagttccacaacattgagacgggcatcatgacggagcggcggtttatctccgtggtgccctccaacttcatcgggcatctgagtgggctcgtgttcaatggccagccctacatggaccagtgcaaggatggtgacatcacctactgtgagctcaatgctcgctttggcctgcgtgccattgtggccgatcccgtcaccttcaagagtcgcagcagctacctggcactcgccacgctccaagcctatgcttccatgcacctcttcttccagttcaagamcacggsccctgatgggcttcttctgttcaactcgggcaacggcaatgamttcattgtcatcgagctggtcaaggggtacatccactacgtgtttgacctggggaatggcccgtccttgatgaaggggaactcagacaaaccagtcaatgacaaccagtggcacaacgtggtggtgtccagggacccaggcaacgtgcacangttcaagattggattcccgnantgtcaaggagca

SEQ ID NO: 276 - protein, 623 aa, Homo sapiens
MAKSCPSVCRCDAGFIYCNDRFLTSIPTGIPEDATTLYLQNNQINNAGIPSDLKNLLKVERIYLYHNSLDEFPTNLPKYVKELHLQENNIRTITYDSLSKIPYLEELHLDDNSVSAVSIEEGAFRDSNYLRLLFLSRNHLSTIPWGLPRTIEELRLDDNRISTISSPSLQGLTSLKRLVLDGNLLNNHGLGDKVFFNLVNLTELSLVRNSLTAAPVNLPGTNLRKLYLQDNHINRVPPNAFSYLRQLYRLDMSNNNLSNLPQGIFDDLDNITQLILRNNPWYCGCKMKWVRDWLQSLPVKVNVRGLMCQAPEKVRGMAIKDLNAELFDCKDSGIVSTIQITTAIPNTVYPAQGQWPAPVTKQPDIKNPKLTKDQQTTGSPSRKTITITVKSVTSDTIHISWKLALPMTALRLSWLKLGHSPAFGSITETIVTGERSEYLVTALEPDSPYKVCMVPMETSNLYLFDETPVCIETETAPLRMYNPTTTLNREQEKEPYKNPNLPLAAIIGGAVALVTIALLALVCWYVHRNGSLFSRNCAYSKGRRRKDDYAEAGTKKDNSILEIRETSFQMLPISNEPISKEEFVIHTIFPPNGMNLYKNNHSESSSNRSYRDSGIPDSDHSHS

SEQ ID NO: 277 - protein, 128 aa, Homo sapiens
MLGPGPWPQLPTSAHHLSPPDPGPGLRFSNGAHFCRVSTSPSRPEAQQKAKVSASRTCRLLSSSLSLTSGRPTAKETSGWRQMGLAIWQGWLVTGPFPPVPGRINHISLPTHLTIVCSAGWVLVPGTA

SEQ ID NO: 278 - protein, 89 aa, Homo sapiens
  SITE (82): Xaa equals any of the naturally occurring L-amino acids
DIEDRLESRAFIQSQIYENNYWIGLSYDERESKWKWIDNGTSPGINSTIMRFSSGRGECAFLTSTRMATIDCIQTYNCICGXENRLYFL

SEQ ID NO: 279 - protein, 333 aa, Homo sapiens
TRPLRMTVEKEAPDAHFTVDKQNISLWPREPPPKSGPSLVPGKTPTVRAALICLTLVLVVSVLLQAVLYPRFMGTISDVKTNVQLLKGRVDNISTLDSEIKKNSDGMEAAGVQIQMVNESLGYVRSQFLKLKTSVEKANAQIQILTRSWEEVSTLNAQIPELKSDLEKASALNTKIRALQGSLENMSKLLKRQNDILQVVSQGWKYFKGNFYYFSLIPKTWYSAEQFCVSRNSHLTSVTSESEQEFLYKTAGGLIYWIGLTKAGMEGDWSWVDDTPFNKVQSARFWIPGEPNNAGNNEHCGNIKAPSLQAWNDAPCDKTFLFICKRPYVPSEP

SEQ ID NO: 280 - protein, 250 aa, Homo sapiens
PRVRSADRWANVKVECEPSWQPFQGHCYRLQAEKRSWQESKKACLRGGGDLVSIHSMAELEFITKQIKQEVEELWIGLNDLKLQMNFEWSDGSLVSFTHWHPFEPNNFRDSLEDCVTIWGPEGRWNDSPCNQSLPSICKKAGQLSQGAAEEDHGCRKGWTWHSPSCYWLGEDQVTYSEARRLCTDHGSQLVTITNRFEQAFVSSLIYNWEGEYFWTALQDLNSTGSFFWLSGDEVMYTHWNRDQPGEPLL

SEQ ID NO: 281 - protein, 139 aa, Homo sapiens
  SITE (7): Xaa equals any of the naturally occurring L-amino acids
  SITE (12): Xaa equals any of the naturally occurring L-amino acids
  SITE (13): Xaa equals any of the naturally occurring L-amino acids
  SITE (20): Xaa equals any of the naturally occurring L-amino acids
  SITE (21): Xaa equals any of the naturally occurring L-amino acids
  SITE (28): Xaa equals any of the naturally occurring L-amino acids
  SITE (29): Xaa equals any of the naturally occurring L-amino acids
  SITE (31): Xaa equals any of the naturally occurring L-amino acids
SELSKIXSTPEXXALPPPSXXHPPSSPXXRXSPSPHSRNSLTCTPGNLLHPGCQSCLRHICVSTHEEARPSTKGQEILISKRHSDMDPQPQPWASTGTFPLTNPIRSFVAREIIPGATFVHGSTVLIVDVIGFLWLPEA

SEQ ID NO: 282 - protein, 205 aa, Homo sapiens
  SITE (161): Xaa equals any of the naturally occurring L-amino acids
  SITE (172): Xaa equals any of the naturally occurring L-amino acids
  SITE (195): Xaa equals any of the naturally occurring L-amino acids
AGLKGARGKMISAGLPGEMGSPGEPGPPGRKGVKGAKGLASFSTCELIQYVRDRSPGRHGKPECPVHPTELVFALDHSRDVTEQEFERMKEMMAFLVRDIKVRENSCPVGAHIAILSYNSHARHLVRFSDAYKKSQLLREIETIPYERSSASREIGRAMRXISRNVFKRTLXGAHTRKIATFFSSGQVRGCPLHXHGLPWKFGAA

SEQ ID NO: 283 - protein, 141 aa, Homo sapiens
  SITE (12): Xaa equals any of the naturally occurring L-amino acids
  SITE (117): Xaa equals any of the naturally occurring L-amino acids
WKSPAATVVNTXYAVGVGKAIEEELQEIAFEPTNKHLFYAEDFSTMDEISEKLKKGICEALEDSDGRQDSPAGELPKTVQQPTESEPVTINIQDLLSCSNFAVQHRYLFEEDNLLRXTQKLSHSTKTFRKPFGRKTRSMQM

SEQ ID NO: 284 - protein, 148 aa, Homo sapiens
GFLACGPLYAYRCGHLHYTTGICSDVSPTFQVVNSIAPVQECSTQLDIVIVLDGSNSIYPWDSVTAFLNDLLERMDIGPKQTQVGIVQYGENVTHEFNLNKYSSTEEVLVAAKKIVQRGGRQTMTALGIDTARWKANYPCSHFICLLR

SEQ ID NO: 285 - protein, 149 aa, Homo sapiens
  SITE (60): Xaa equals any of the naturally occurring L-amino acids
  SITE (88): Xaa equals any of the naturally occurring L-amino acids
ESGGSPAEAGEQPTMEPQKIMPPSKPHPPVVGKVTHHSIELYWDLEKKAKRQGPQEQWFXFSIEEEDPKMHTYGIIYTGYATKHVVEXLEPRTLYRFRLKVTSPSGECEYSPLVSVSTTREPISSEHLQRAVSVNDEDLLVRILQRRPC

SEQ ID NO: 286 - protein, 177 aa, Homo sapiens
  SITE (125): Xaa equals any of the naturally occurring L-amino acids
ALIRLTIGKAGTPAGTGPEFPGRPTRPHMLVQGLEPNTKYEFAVRLHVDQLSSPWSPVVYHSTLPEAPAGPPVGVKVTLIEDDTALVSWKPPDGPETVVTRYTILYASRKAWIAGEWQVLHREGXITMALLENLVAGNVYIVKISASNEVGEGPFSNSVELAVLPKETSESNQSPSV

SEQ ID NO: 287 - protein, 212 aa, Homo sapiens
HEPIPTRVCKVSDLHEGHFYEFRARAANWAGVGELSAPSSLFECKEWTMPQPGPPYDVRASEVRATSLVLQWEPPLYMGAGPVTGYHVSFQEEGSEQWKPVTPGPISGTHLRVSDLQPGKSYVFQVQAMNSAGLGQPSMPTDPVLLEDKPGAHEIEVGVDEEGFIYLAFEAPEAPDSSEFQWSKDYKGPLDPQRVKIEDKVNKSKVILKEPG

SEQ ID NO: 288 - protein, 492 aa, Homo sapiens
EYSIVLEARDGGGMIAQCTVEVEVIDENDNAPEVIFQSLPNLIMEDAELGTHIALLKVRDKDSRHNGEVTCKLEGDVPFKILTSSRNTYKLVTDAVLDREQNPEYNITVTATDRGKPPLSSSSSITLHIGDVNDNAPVFSQSSYIVHVAENNPPGASISQVRASDPDLGPNGQVSYCIMASDLEQRELSSYVSISAESGVVFAQRAFDHEQLRAFELTLQARDQGSPALSANVSLRVLVDDRNDNAPRVLYPALGPDGSALFDMVPHAAEPGYLVTKVVAVDADSGHNAWLSYHVLQASEPGLFSLGLRTGEVRTARALGDRDAVRQRLLVAVRDGGQPPLSATATLHLVFADSLQEVLPDITDRPDPSDLQAELQFYLVVALALISVLFLVAMILAIALRLRRSSSPASWSCFQPGLCVKSESVVPPNYSEGTLPYSYNLCVAHTGKTEFNFLKCSEQLSSGQDILCGDSSGALFPLCNSSELTSHQVSFL

SEQ ID NO: 289 - protein, 378 aa, Homo sapiens
HELRAKAIDRKTGRQVEPESEFIIKIHDINDNEPKFTKDLYTASVPEMSGVGTSVIQVTATDADDANYGNSAKVVYSILQGQPYFSVDPESGIIKTALPDMSRENREQYQVVIQAKDMGGQMGGLSGTTTVNITLTDVNNNPPRFPQSTYQFNSPESVPLGTHLGRIKANDPDVGENAEMEYSIAEGDGADMFDVITDKDTQEGIITVKQNLDFENQMLYTLRVDASNTHPDPRFLHLGPFKDTAVVKISVEDIDEPPVFTKVSYLIEVDEDVKEGSIIGQVTAYDPDARNNLIKYSVDRHTDMDRIFGIHSENGSIFTLKALDRESSPWHNITVTATEISKLELHLPEDTVFHQSGKIIAPARLIFLSGMIVSLARS

SEQ ID NO: 290 - protein, 188 aa, Homo sapiens
HEAQRSKQGAEWMSPNQENKQNKKKKRKKRKSPKSSLLNFVTIEESKPDDAVHEPINGTISLPAELEEQSIGRFDWGPAPPTTFKPNSPDLAKHYKSASPQPAFHLKPDTPVSVKKHHVIQELPLDNTFVGGCDTLSKRSSTSSDHFSASECSSQGGFKTKGPLHTRQVNEHFYWSISTAYKCPVNQY

SEQ ID NO: 291 - protein, 487 aa, Homo sapiens
LQEFGTSYSIEEDDSQTFDIITNHETQEGIVILKKKVDFEHQNHYGIRAKVKNHHVPEQLMKYHTEASTTFIKIQVEDVDEPPLFLLPYYVFEVFEETPQGSFVGVVSATDPDNRKSPIRYSITRSKVFNINDNGTITTSNSLDREISAWYNLSITATEKYNIEQISSIPLYVQVLNINDHAPEFSQYYETYVCENAGSGQVIQTISAVDRDESIEEHHFYFNLSVEDTNNSSFTIIDNQDNTAVILTNRTGFNLQEEPVFYISILIADNGIPSLTSTNTLTIHVCDCGDSGSTQTCQYQELVLSMGFKTEVIIAILICIMIIFGFIFLTLGLKQRRKQILFPEKSEDFRENIFQYDDEGGGEEDTEAFDIAELRSSTIMRERKTRKTTSAEIRSLYRQSLQVGPDSAIFRKFILEKLEEANTDPCAPPFDSLQTYAFEGTGSLAGSLSSLESAVSDQDESYDYLNELGPRFKRLACMFGSAVQSNN

SEQ ID NO: 292 - protein, 293 aa, Homo sapiens
EIAGPGPGQETQARTEERVTDRDKDSWRETHTPTQEEGGESEGAPGKQGGTQGQGGGLGPLGCCRPPGPRGAHSEGLCPLPPPRGGPGQPGRSGGRGLLGPIQLGQGAEERTPVVQRLRGAGGAAGFAAGAQGAEGAARGAAALVAVHLHRVVRGYAGVLVRLAEPQRQELRHVGGAGGSGLARHPGPGQHVSARGRAGRRGGRPVRVLQGRDVEGLGVLLAAALVVVGDDVLSDVLLLQYHQCFLLLPPQGHEEHHQGCARGAHTGPEPAGPGAGGLSPCERLTHQVQKPCA

SEQ ID NO: 293 - protein, 182 aa, Homo sapiens
PSSMQEAIILLALLGAMSGGEALHLILLPATGNVAENSPPGTSVHKFSVKLSASLSPVIPGFPQIVNSNPLTEAFRVNWLSGTYFEVVTTGMEQLDFETGPNIFDLQIYVKDEVGVTDLQVLTVQVTDVNEPPQFQGNLAEGRIHQDVHCSPDSGIREGPGGQRETEKVNKQAAVSLEKAAA

SEQ ID NO: 294 - protein, 358 aa, Homo sapiens
NRLTIGKAGTPAGTGPEFPGRPTRPNLTVIAAEINNPKETTRVAVFVRILDVNDNAPQFAVFYDTFVCENARPGQLIQTISAVDKDDPLGGQKFFFSLAAVNPNFTVQDNEDNTARILTRKNGFNRHEISTYLLPVVISDNDYPIQSSTGTLTIRVCACDSQGNMQSCSAEALLLPAGLSTGALIAILLCIIILLVIVVLFAALKRQRKKEPLILSKEDIRDNIVSYNDEGGGEEDTQAFDIGTLRNPAAIEEKKLRRDIIPETLFIPRRTPTAPDNTDVRDFINERLKEHDLDPTAPPYDSLATYAYEGNDSIAESLSSLESGTTEGDQNYDYLREWGPRFNKLAEMYGGGESDKDS

SEQ ID NO: 295 - protein, 397 aa, Homo sapiens
TRLYATDADSEERGQVSYFLGPDAPSYFSLDSVTGILTVSTQLDREEKEKYRYTVRAVDCGKPPRESVATVALTVLDKNDNSPRFINKDFSFFVPENFPGYGEIGVISVTDADAGRNGWVALSVVNQSDIFVIDTGKGMLRAKVSLDREQQSSYTLWVEAVDGGEPALSSTAKITILLLDINDNPPLVLFPQSNMSYLLVLPSTLPGSPVTEVYAVDKDTGMNAVIAYSIIGRRGPRPESFRIDPKTGNITLEEALLQTDYGLHRLLVKVSDHGYPEPLHSTVMVNLFVNDTVSNESYIESLLRKEPEINIEEKEPQISIEPTHRKVESVSCMPTLVALSVISLGSITLVTGMGIYICLRKGEKHPREDENLEVQIPLKGKIDLHMRERKPMDISNI

SEQ ID NO: 296 - protein, 453 aa, Homo sapiens
  SITE (393): Xaa equals any of the naturally occurring L-amino acids
  SITE (395): Xaa equals any of the naturally occurring L-amino acids
  SITE (399): Xaa equals any of the naturally occurring L-amino acids
  SITE (401): Xaa equals any of the naturally occurring L-amino acids
  SITE (403): Xaa equals any of the naturally occurring L-amino acids
  SITE (405): Xaa equals any of the naturally occurring L-amino acids
  SITE (410): Xaa equals any of the naturally occurring L-amino acids
  SITE (416): Xaa equals any of the naturally occurring L-amino acids
  SITE (432): Xaa equals any of the naturally occurring L-amino acids
HYRRYACRYRSGIPGSTHASAAIDFEKSKVLTFKLLAVEVNTPEKFSSTADVVIQLLDTNDNVPKFDSLYYVARIPENAPGGSSVVAVTAVDPDTGPWGEVKYSTYGTGADLFLIHPSTGLIYTQPWASLDAEATARYNFYVKAEDMEGKYSVAEVFITLLDVNDHPPQFGKSVQKKTMVLGTPVKIEAIDEDAEEPNNLVDYSITHAEPANVFDINSHTGEIWLKNSIRSLDALHNITPGRDCLWSLEVQAKDRGSPSFSTTALLKIDITDAETLSRSPMAAFLIQTKDNPMKAVGVLAGTMATVVAITVLISTATFWRNKKSNKVLPMRRVLRKRPSPAPRTIRIEWLKSKSTKAATKFMLKEKPPNENCNNNSPESSLLPRAPALPPPPXVXPSTXAXQXTXPTVSXSLTPQXTQPPPKPKTMGSPVQXTLISELKQKFEKKSVHNKAYF

SEQ ID NO: 297 - protein, 179 aa, Homo sapiens
  SITE (167): Xaa equals any of the naturally occurring L-amino acids
  SITE (170): Xaa equals any of the naturally occurring L-amino acids
  SITE (178): Xaa equals any of the naturally occurring L-amino acids
  SITE (179): Xaa equals any of the naturally occurring L-amino acids
VPFKIYSSSNNYYKLVTDGALDREQTPEYNVTIVATDRGKPPLSSSRSITLYVADINDNAPVFDQTSYVVHVAENNPPGASIAQVSASDPDLGLNGHISYSIVASDLEPLAVSSYVSVSAQSGVVFAQRAFDHEQLRAFALTLQARDHGSPTLSANVSLRVLVGDRXDNXTAGAVPSXX

SEQ ID NO: 298 - protein, 210 aa, Homo sapiens
  SITE (21): Xaa equals any of the naturally occurring L-amino acids
  SITE (23): Xaa equals any of the naturally occurring L-amino acids
  SITE (202): Xaa equals any of the naturally occurring L-amino acids
  SITE (208): Xaa equals any of the naturally occurring L-amino acids
  SITE (209): Xaa equals any of the naturally occurring L-amino acids
FKVPLPVPVRNSRVDPRVRPXDXFSVDPNNGTLFTIVGTVALGHDGSGAVDVVLEARDHGAPGRAARATVHVQLQDQNDHAPSFTLSHYRVAVTEDLPPGSTLLTLEATDADGSRSHAAVDYSIISGNWGRVFQLEPRLAEAGESAGPGPRALGCLVLLEPLDFESLTQYNLTVAAADRGAATPKLSRPVTVTVLDVNDNPXALPEHXXV

SEQ ID NO: 299 - protein, 211 aa, Homo sapiens
  SITE (180): Xaa equals any of the naturally occurring L-amino acids
QISAADLDSPASPIRYSILPHSDPERCFSIQPEEGTIHTAAPLDREARAWHNLTVLATELDSSAQASRVQVAIQTLDKNDNAPQLAEPYDTFVCDSAAPGQLIQVIRALDRDEVGNSSHVSFQGPLGPDANFTVQDNRDGSASLLLPSRPAPPRHAPYLVPIELWDWGQPALSSTATVTXSVCRCQPDGSVASCLPWWCSSWPCGGRSKKH

SEQ ID NO: 300 - protein, 251 aa, Homo sapiens
RHPFSWASSVSTIAMQQQEKLIQQERALLNFTEWKRSCALQMKYCQAFMQNSLSSAHNSSPCPNNWIQNRESCYYVSEIWSIWHTSQENCLKEGSTLLQIESKEEMDFITGSLRKIKGSYDYWVGLSQDGHSGRWLWQDGSSPSPGLLPAERSQSANQVCGYVKSNSLLSSNCSTWKYFICEKYAVEILCLKRNCVQSVLLHCYLEHAIGKPTPTPPLKNRTVNQNVGHEISNLGLNNTLGNILPHRPDFI

SEQ ID NO: 301 - protein, 186 aa, Homo sapiens
  SITE (177): Xaa equals any of the naturally occurring L-amino acids
  SITE (178): Xaa equals any of the naturally occurring L-amino acids
ARAATHFNLKTHTNSRDLKTAIEKITQRGGLSNVGRAISFVTKNFFSKANGNRSGAPNVVVVMVDGWPTDKVEEASRLARESGINIFFITIEGAAENEKQYVVEPNFANKAVCRTNGFYSLHVQSWFGLHKTLQPLVKRVCDTDRLACSKTCLNSADIGFVIDGFSSVGTGNFRPSXXCDQPHQRV

SEQ ID NO: 302 - protein, 119 aa, Homo sapiens
AVPGAGGRELQNNSCEPCPTSWLSFEGSCYFFSVPKTTWAAAQDHCADASAHLVIVGGLDEQGFLTRNTRGRGYWLGLRAVRHLGKVQGYQWVDGSLSASTTGNQGEPNDAWGREKLCS

SEQ ID NO: 303 - protein, 246 aa, Homo sapiens
HASADAWADAWAEITYAEVRFKNEFKSSGINTASSAASKERTAPLKSNTGFPKLLCASLLIFFLLLAISFFIAFVIFFQKYSQLLEKKTTKELVHTTLECVKKNMPVEETAWSCCPKNWKSFSSNCYFISTESASWQDSEKDCARMEAHLLVINTQEEQDFIFQNLQEESAYFVGLSDPEGQRHWQWVDQTPYNESSTFWHPREPSDPNERCVVLNFRKSPKRWGWNDVNCLGPQRSVCEMMKIHL

SEQ ID NO: 304 - protein, 96 aa, Homo sapiens
KSELVCYEPHGTNLLFPGVLSSPCPPNWIIYEKSCYLFSMSLNSWDGSKRQCWQLGSNLLKIDSSNELSLTLLPKLECSEAATSQAQVILPPQLPE

SEQ ID NO: 305 - protein, 190 aa, Homo sapiens
VGQGEKNRKTHSLAACQPQDLSFPNDPLWRSPGESDDHTCVSKRTHITHIPHIHLAHHMHYTCHIHGTHTTHTPHTHHTRHTHIYTQHYHLLGRDTQCVARSTKDSAWDSARWWLDSRFVLGGVEWCPICPAPGALCAPVSETDPVVHFTCELYQKCLLLLGGHRCQMGSLGHAELLSLMPRLLDTRKII

SEQ ID NO: 306 - protein, 143 aa, Homo sapiens
  SITE (1): Xaa equals any of the naturally occurring L-amino acids
  SITE (11): Xaa equals any of the naturally occurring L-amino acids
  SITE (64): Xaa equals any of the naturally occurring L-amino acids
  SITE (70): Xaa equals any of the naturally occurring L-amino acids
  SITE (72): Xaa equals any of the naturally occurring L-amino acids
  SITE (112): Xaa equals any of the naturally occurring L-amino acids
  SITE (137): Xaa equals any of the naturally occurring L-amino acids
  SITE (138): Xaa equals any of the naturally occurring L-amino acids
  SITE (140): Xaa equals any of the naturally occurring L-amino acids
XKSWVQAQGAXQELGAQLLSLASYEEEHFVANMLNKIFGESEPEIHEQHWFWIGLNRRDPRGGXELALEXRXRVLLPQFRPEPARRRRHPRLCGAGPGLPAWVAMHATHSWXGICKSPELRDFREPDDSLQGDGNGXXSXKAI

SEQ ID NO: 307 - protein, 265 aa, Homo sapiens
GTSTRGVTCSSLLCGLLSYQSTLDMHEEEIYTSLQWDSPAPDTYQKCLSSNKCSGACCLVMVISCVFCMGLLTASIFLGVKLLQVSTIAMQQQEKLIQQERALLNFTEWKRSCALQMKYCQAFMQNSLSSAHNSSPCPNNWIQNRESCYYVSEIWSIWHTSQENCLKEGSTLLQIESKEEMDFITGSLRKIKGSYDYWVGLSQDGHSGRWLWQDGSSPSPGLLPAERSQSANQVCGYVKSNSLLSSNCSTWKYFICEKYALRSSV

SEQ ID NO: 308 - protein, 619 aa, Homo sapiens
  SITE (29): Xaa equals any of the naturally occurring L-amino acids
ATTCRSSPGPRSSTGGSACTPLRAMGRFXWTDGSIINFISWAPGKPRPVGKDKKCVYMTASREDWGDQRCLTALPYICKRSNVTKETQPPDLPTTALGGCPSDWIQFLNKCFQVQGQEPQSRVKWSEAQFSCEQQEAQLVTITNPLEQAFITASLPNVTFDLWIGLHASQRDFQWVEQEPLMYANWAPGEPSGPSPAPSGNKPTSCAVVLHSPSAHFTGRWDDRSCTEETHGFICQKGTDPSLSPSPAALPPAPGTELSYLNGTFRLLQKPLRWHDALLLCESHNASLAYVPDPYTQAFLTQAARGLRTPLWIGLAGEEGSRRYSWVSEEPLNYVGWQDGEPQQPGGCTYVDVDGAWRTTSCDTKLQGAVCGVSSGPPPPRRISYHGSCPQGLADSAWIPFREHCYSFHMELLLGHKEARQRCQRAGGAVLSILDEMENVFVWEHLQSYEGQSRGAWLGMNFNPKGGTLVWQDNTAVNYSNWGPPGLGPSMLSHNSCYWIQSNSGLWRPGACTNITMGVVCKLPRAEQSSFSPSALPENPAALVVVLMAVLLLLALLTAALILYRRRQSIERGAFEGARYSRSSSSPTEATEKNILVSDMEMNEQQSMRPILVRQRGTM

SEQ ID NO: 309 - protein, 203 aa, Homo sapiens
DPRVRLHWYKILLGISGTVNGILTLTLISLILLVSQGVLLKCQKGSCSNATQYEDTGDLKVNNGTRRNISNKDLCASRSADQTVLCQSEWLKYQGKCYWFSNEMKSWSDSYVYCLERKSHLLIIHDQLEMAFIQKNLRQLNYVWIGLNFTSLKMTWTWVDGSPIDSKIFFIKGPAKENSCAAIKESKIFSETCSSVFKWICQY

SEQ ID NO: 310 - protein, 182 aa, Homo sapiens
NLTGNIWNREWYSHFDFDLLDPVGFSGSIAKMPKRKLLKVNNGTRRNISNKDLCASRSADQTVLCQSEWLKYQGKCYWFSNEMKSWSDSYVYCLERKSHLLIIHDQLEMAFIQKNLRQLNYVWIGLNFTSLKMTWTWVDGSPIDSKIFFIKGPAKENSCAAIKESKIFSETCSSVFKWICQY

SEQ ID NO: 311 - protein, 277 aa, Homo sapiens
  SITE (30): Xaa equals any of the naturally occurring L-amino acids
  SITE (177): Xaa equals any of the naturally occurring L-amino acids
  SITE (187): Xaa equals any of the naturally occurring L-amino acids
  SITE (188): Xaa equals any of the naturally occurring L-amino acids
  SITE (209): Xaa equals any of the naturally occurring L-amino acids
  SITE (225): Xaa equals any of the naturally occurring L-amino acids
  SITE (272): Xaa equals any of the naturally occurring L-amino acids
TARGMVPGSEGPARAGSVVADVVFVIEGTXNLGPYFEGLRKHYLLPAIEYFNGGPPAETDFGGDYGGTQYSLVVFNTVDCAPESYVQCHAPTSSAYEFVTWLDGIKFMGGGGESCSLIAEGLSTALQLFDDFKKMREQIGQTHRVCLLICNSPPYLLPAVESTTYSGCTTENLVQQXGERGIHFSIXXPRKLPALRLLFEKAAPPALLXPLQPPTDVSQDPRHMXLVRGLVLPVGGGSAPGPLQSKQPAPLPPAAPSGATLSAAPQQPLPPXPPQYQ

SEQ ID NO: 312 - protein, 587 aa, Homo sapiens
  SITE (21): Xaa equals any of the naturally occurring L-amino acids
  SITE (93): Xaa equals any of the naturally occurring L-amino acids
  SITE (214): Xaa equals any of the naturally occurring L-amino acids
  SITE (230): Xaa equals any of the naturally occurring L-amino acids
  SITE (296): Xaa equals any of the naturally occurring L-amino acids
  SITE (469): Xaa equals any of the naturally occurring L-amino acids
  SITE (470): Xaa equals any of the naturally occurring L-amino acids
  SITE (504): Xaa equals any of the naturally occurring L-amino acids
  SITE (582): Xaa equals any of the naturally occurring L-amino acids
FVLPSPRPRDPLSRSARQRGXLQPSRRGGFQVRVRGGRWRLGPRPERNSFRELSPWARIVCRNSPESGGGGLDRASTGIRQEFRRQLRRWRRXPLSSQDLPLSLPVSWWVPLPQPGVSAARRPPPQSACRVTPATFATLLSLGDCEREGVSGPRPQDGGGRSPARSPGSWLFPGLWLLVLSGPGGLLRAQEQPSCRRAFDLYFVLDKSGSVANXWIEIYNFVQQLAERFXSPEMRLSFIVFSSQATIILPLTGDRGKISKGLEDLKRVSPVGETYIHEGLKLANEQIQKAGGLKTXSIIIALTDGKLDGLVPSYAEKEAKISRSLGASVYCVGVLDFEQAQLERIADSKEQVFPVKGGFQALKGIINSILAQSCTEILELQPSSVCVGEEFQIVLSGRGFMLGSRNGSVLCTYTVNETYTTSVKPVSVQLNSMLCPAPILNKAGETLDVSVSFNGGKSVISGSLIVTAXXCSNGIAAIIVILVLLLLLGIGLMWWFWPLCCKVXIKDPPPPPPPAPKEEEEEPLPTKKWPTVDASYYGGRGVGGIKRMEVRWGDKGSTEEGARLEKAKNAVVKIPEETEEPXKAKTT

SEQ ID NO: 313 - protein, 707 aa, Homo sapiens
APRRRCTPDPAAVPRAMDLPRGLVVAWALSLWPGFTDTFNMDTRKPRVIPGSRTAFFGYTVQQHDISGNKWLVVGAPLETNGYQKTGDVYKCPVIHGNCTKLNLGRVTLSNVSERKDNMRLGLSLATNPKDNSFLACSPLWSHECGSSYYTTGMCSRVNSNFRFSKTVAPALQRCQTYMDIVIVLDGSNSIYPWVEVQHFLINILKKFYIGPGQIQVGVVQYGEDVVHEFHLNDYRSVKDVVEAASHIEQRGGTETRTAFGIEFARSEAFQKGGRKGAKKVMIVITDGESHDSPDLEKVIQQSERDNVTRYAVAVLGYYNRRGINPETFLNEIKYIASDPDDKHFFNVTDEAALKDIVDALGDRIFSLEGTNKNETSFGLEMSQTGFSSHVVEDGVLLGAVGAYDWNGAVLKETSAGKVIPLRESYLKEFPEELKNHGAYLGYTVTSVMSSRQGRVYVAGAPRFNHTGKVILFTMHNNRSLTIHQAMRGQQIGSYFGSEITSVDIDGDGVTDVLLVGAPMYFNEGRERGKVYVYELRQNLFVYNGTLKDSHSYQNARFGSSIASVRDLNQDSYNDVVVGAPLEDNHAGAIYIFHGFRGSILKTPKQRITASELATGLQYFGCSIHGQLDLNEDGLIDLAVGALGNAVILWSRPVVQINASLHFEPSKINIFHRDCKRSGRDATCLAAFLCFTPIFLAPHFQTTTVGI

SEQ ID NO: 314 - protein, 335 aa, Homo sapiens
RSADGLCGNKDRERGNEFTRNQQAAQEVVNPKKKMKKKKYVNSGTVTLLSFAVESECTFLDYIKGGTQINFTVAIDFTASNGNPSQSTSLHYMSPYQLNAYALALTAVGEIIQHYDSDKMFPALGFGAKLPPDGRVSHEFPLNGNQENPSCCGIDGILEAYHRSLRTVQLYGPTNFAPVVTHVARNAAAVQDGSQYSVLLIITDGVISDMAQTKEAIVNAAKLPMSIIIVGVGQAEFDAMVELDGDDVRISSRGKLAERDIVQFVPFRDYVDRTGNHVLSMARLARDVLAEIPDQLVSYMKAQGIRPRPPPAAPTHSPSQSPARTPPASPLHTHI

SEQ ID NO: 315 - protein, 146 aa, Homo sapiens
APGPGRDGTENWRLGLFSASRSWLSFQASTVCTWSQERACAYSSVQLLKDVTELQILGEISFNKSLYEGLNAENHRTKITVVFLKDEKYHSLPIIIKGSVGGLLVLIVILVILFKCGFFKRKYQQLNLESIRKAQLKSENLLEEEN

SEQ ID NO: 316 - protein, 91 aa, Homo sapiens
  SITE (61): Xaa equals any of the naturally occurring L-amino acids
KNIILFLGLHKGSPKDHERNGCRLCKSDKYCEPHDYEYCCPCEWHRTEHDRQLNEVENNIXKKACCCEGFPFHEVISSNSTVLILETFLKV

SEQ ID NO: 317 - protein, 279 aa, Homo sapiens
  SITE (80): Xaa equals any of the naturally occurring L-amino acids
  SITE (269): Xaa equals any of the naturally occurring L-amino acids
FCVRSVSEAGVGESSAATEPIRVKQALATPSAPYGFALLNCGKNEMVIGWKPPKRRGGGKILGYFLDQHDSEELDWHAVXQQPIPTRVCKVSDLHEGHFYEFRARAANWAGVGELSAPSSLFECKEWTMPQPGPPYDVRASEVRATSLVLQWEPPLYMGAGPVTGYHVSFQEEGSEQWKPVTSGPISGTHLRVSDLQPGKSYVFQVQAMNSAGLGQPSMPTDPVLLEDKPGAHEIEVGVDEEGFIYLAFEAPEAPSPQSSVGPKEYKGXNGTPEGQDRR

SEQ ID NO: 318 - protein, 195 aa, Homo sapiens
LSTGPQLLLSSGRISGLSRASACTRSSTNSSADDILVYRMIPAESRSFLLTDLASGRTYDLCVLAVYEDSATGLTATRPVGCARFSTEPALRPCGAPHAPFLGGTMIIALGGVIVASVLVFIFVLLMRYKVHGGQPPGKAKIPAPVSSVCSQTNGALGPTPTPAPPAPEPAALRAHTVVQLDCEPWGPGHEPVGP

SEQ ID NO: 319 - protein, 178 aa, Homo sapiens
  SITE (37): Xaa equals any of the naturally occurring L-amino acids
  SITE (39): Xaa equals any of the naturally occurring L-amino acids
  SITE (151): Xaa equals any of the naturally occurring L-amino acids
  SITE (168): Xaa equals any of the naturally occurring L-amino acids
  SITE (172): Xaa equals any of the naturally occurring L-amino acids
  SITE (175): Xaa equals any of the naturally occurring L-amino acids
EKQHGKPRAEEGEGPILSALIYCTSEGRALTRHAASXRXGMNIEVGNISYTGAIISWSSSEPCLEDYYHIMYRPNWNSIFSGYLRYSFHHEEKVPRTISSVVLEHLAPSTLYFLCISCKKAAFPYRHYCTMFHTLDKSPLAPGSSLGRPPXLSLGADGHSAGPASQAXWASXCFXILG

SEQ ID NO: 320 - protein, 449 aa, Homo sapiens
GLSEPHTPRSSCHSRRLRGGSPAPRLSLGAASPRPRPPSLPLPLPLPFPLFLPTRPAERAWIRSRRASEWVGKMEVPRLDHALNSPTSPCEEVIKNLSLEAIQLCDRDGNKSQDSGIAEMEELPVPHNIKISNITCDSFKISWEMDSKSKDRITHYFIDLNKKENKNSNKFKHKDVPTKLVAKAVPLPMTVRGHWFLSPRTEYTVAVQTASKQVDGDYVVSEWSEIIEFCTADYSKVHLTQLLEKAEVIAGRMLKFSVFYRNQHKEYFDYVREHHGNAMQPSVKDNSGSHGSPISGKLEGIFFSCSTEFNTGKPPQDSPYGRYRFEIAAEKLFNPNTNLYFGDFYCMYTAYHYVILVIAPVGSPGDEFCKQRLPQLNSKDNKFLTCTEEDGVLVYHHAQDVILEVIYTDPVDLSLGTVAEITGHQLMSLSTANAKKDPSCKTCNISVGR

SEQ ID NO: 321 - protein, 122 aa, Homo sapiens
  SITE (14): Xaa equals any of the naturally occurring L-amino acids
  SITE (120): Xaa equals any of the naturally occurring L-amino acids
HEYEFKVRPSSGRXRGPDSNVLLLRLPEKVPSAPPQEVTLKPGNGTVFVSWVPPPAENHNGIIRGYQVWSLGNTSLPPANWTVVGEQTQLEIATHMPGSYCVQWLQSLVLELGSPVDLSXSF

SEQ ID NO: 322 - protein, 101 aa, Homo sapiens
GRDDPGASPQSSSQPDHGRLSPPEAPDRPTISTASETSVYVTWIPRGNGGFPIQSFRVEYKKLKKVGDWILATSAIPPSRLSVEITGLRERHLLQVSSSGF

SEQ ID NO: 323 - protein, 209 aa, Homo sapiens
  SITE (209): Xaa equals any of the naturally occurring L-amino acids
GIFSYIIQEYLCTVQTTLESLSAVADIIVRGPPGPPEDVQVEDISSTTSQLSWRAGPDNNSPIQIFTIQTRTPFSVGWQAVATVPEILNGKTYNATVVGLSPWVEYEFRVVAGNSIGIGEPSEPSELLRTKASVPVVAPVNIHGGGGSRSELVITWESIPEELQNGEGFGYIIMFRPVGSTTWSKEKVSSVESSRFVYRNESIIPLSPX

SEQ ID NO: 324 - protein, 133 aa, Homo sapiens
  SITE (38): Xaa equals any of the naturally occurring L-amino acids
  SITE (92): Xaa equals any of the naturally occurring L-amino acids
RWRKRNLRTIVQLWILNQTREHLLCQQQPAVPPPPPSXLPLSNAAATDLCLQWFRPTCCTGNSTGIASAPQLSCSVPSANVCSPTTALDAAXCSSSAAAFKQLPAWEPCCCSGKFVQWKTIYISHREVSHSSQ

SEQ ID NO: 325 - protein, 93 aa, Homo sapiens
DNGSKIQNFVLEWDEGKGNGEFCQCYMGSQKQFKITKLSPAMGCKFRLSARNDYGTSGFSEEVLYYTSGCAPSMPASPVLTKAGITWLSLQWE

SEQ ID NO: 326 - protein, 55 aa, Homo sapiens
AHLSARLSALILDEVAILPAPQNLSVLSTNMKHLLMWSPVIAPGETVYYSVEYQG

SEQ ID NO: 327 - protein, 185 aa, Homo sapiens
  SITE (119): Xaa equals any of the naturally occurring L-amino acids
GMFTLDVEENENGERTPYLIVMGALDRETQDQYVSIIIAEDGGSPPLLGSATLTIGISDINDNCPLFTDSQINVTVYGNATVGTPIAAVQAVDKDLGTNAQITYSYSQKVPQASKDLFXLDENTGVIKLFSKIGGSVLESHKLTILANGPGCIPAVITALVSIIKVIFRPPEIVPRYIANEIDGV

SEQ ID NO: 328 - protein, 391 aa, Homo sapiens
  SITE (196): Xaa equals any of the naturally occurring L-amino acids
  SITE (363): Xaa equals any of the naturally occurring L-amino acids
TSSSPQSHSIPTASPSTLPSSMTMASSTHPEEPALMIGACWTEEKNKEKEKGDNSTDTTQGDPLSIHHYFHGYLAGFSVRSGRLESREVIECLYACREGLDYRDFESLGKGMKVHVNPSQSLLTLEGDDVETFNHALQHVAYMNTLRFATPGVRPLRLTTAVKCFSEESCVSIPEVEGYVVVLQPDAPQILLSGTXHFARPAVDFEGTNGVPLFPDLQITCSISHQVEAKKDESWQGTVTDTRMSDEIVHNLDGCEISLVGDDLDPERESLLLDTTSLQQRGLELTNTSAYLTIAGVESITVYEEILRQARYRLRHGAALYTRKFRLSCSEMNGRYSSNEFIVEVNVLHSMNRVAHPSHVLSXQQFLHRGHQPPPEMAGHSLASSHRNSST

SEQ ID NO: 329 - protein, 151 aa, Homo sapiens
  SITE (114): Xaa equals any of the naturally occurring L-amino acids
  SITE (130): Xaa equals any of the naturally occurring L-amino acids
  SITE (149): Xaa equals any of the naturally occurring L-amino acids
ALINSRFPIPSATDPDTGFNGVQHYELLNGQSVFGLDIVETPEGEKWPQLIVQQNLDREQKDTYVMKIKVEDGGTPQKSSTAILQVTVSDVNDNRPVFKEGQVEVHIPENAPVXTSVIQLHATDGRYRQXMLKSGTFLVPRSPLQPKDXLL

SEQ ID NO: 330 - protein, 157 aa, Homo sapiens
SSDIPRQIRVQMSHHSFALSFLASLPKNMVICAMIMICSLGGKRKYTGLPETEMSLFQELDTSRGVMMARPVGRWSSEAPPGLPRVAESGRCRQRLKATSSSKPFPKWPFIQPVAVPASAVVFIWWHLIEKVILSLYKNKVWASCNTGTKDTLYSQD

SEQ ID NO: 331 - protein, 219 aa, Homo sapiens
  SITE (119): Xaa equals any of the naturally occurring L-amino acids
  SITE (123): Xaa equals any of the naturally occurring L-amino acids
  SITE (145): Xaa equals any of the naturally occurring L-amino acids
  SITE (189): Xaa equals any of the naturally occurring L-amino acids
  SITE (192): Xaa equals any of the naturally occurring L-amino acids
  SITE (196): Xaa equals any of the naturally occurring L-amino acids
  SITE (211): Xaa equals any of the naturally occurring L-amino acids
  SITE (214): Xaa equals any of the naturally occurring L-amino acids
  SITE (219): Xaa equals any of the naturally occurring L-amino acids
ELDREEVDFYSFGVEARDHGTPALTASASVSVTVLDVNDNNPTFTQPEYTVRLNEDAAVGTSVVTVSAVDRDAHSVITYQITSGNTRNRFSITSQSGGGLVSLALPLDYKLERQYVLAXTASXGTRQDTAQIVVNVTDANTHRPXFQSSHYTVNGNEDRPAGTTVVLISATDEDTGENARITYFMEDSXPQXRIDXTRGLSPPSLSWTTKXQVXLHPWX

SEQ ID NO: 332 - protein, 132 aa, Homo sapiens
QFTESHLCSLMGDNPFQPKSNSKMAELFMECEEEELEPWQKKVKEVEDDDDDEPIFVGEISSSKPAISNILNRVNPSSYSRGLKNGALSRGITAAFKPTSQHYTNPTSNPVPASPINFHPESRSSDSLYCQP

SEQ ID NO: 333 - protein, 91 aa, Homo sapiens
  SITE (43): Xaa equals any of the naturally occurring L-amino acids
  SITE (61): Xaa equals any of the naturally occurring L-amino acids
  SITE (80): Xaa equals any of the naturally occurring L-amino acids
  SITE (83): Xaa equals any of the naturally occurring L-amino acids
VRVLDANDNAPEISFSTVKEAVSEGAAPGTVVALFSVTDRDSXENGQVQCELLGDVPFRLXSSFKNYYTIVTEAPLDREXGGXYTLTVVAR

SEQ ID NO: 334 - protein, 253 aa, Homo sapiens
  SITE (201): Xaa equals any of the naturally occurring L-amino acids
  SITE (244): Xaa equals any of the naturally occurring L-amino acids
RPGTLLGTFNAMDPDSQIRYELVHDPANWVSVDKNSGVVITVEPIDRESPHVNNSFYVIIIHAVDDGFPPQTATGTLMLFLSDINDNVPTLRPRSRYMEVCESAVHEPLHIEAEDPDLEPFSDPFTFELDNTWGNAEDTWKLGRNWGQSVELLTLRSLPRGNYLVPLFIGDKQGLSQKQTVHVRICPCASGLTCVELADAXVGLHVGALFPVCAAFVALAVALLFLMRCYFVLEPKRHGCSVSXDERPPNTGY

SEQ ID NO: 335 - protein, 141 aa, Homo sapiens
  SITE (17): Xaa equals any of the naturally occurring L-amino acids
  SITE (127): Xaa equals any of the naturally occurring L-amino acids
  SITE (133): Xaa equals any of the naturally occurring L-amino acids
  SITE (140): Xaa equals any of the naturally occurring L-amino acids
HEAPTSSGSRRRTTACXDEVPWLHSPSWLLTPMTMTLCSSSRSTRRASGRTWRLAMRCSLSGPRMVMPLPMPIFCTACWRGLGASPSEVFEIDPRSGVIRTRGPVDREEVESYQLTVEASDQGRDPXPRSTTXRWFPFCXG

SEQ ID NO: 336 - protein, 46 aa, Homo sapiens
  SITE (39): Xaa equals any of the naturally occurring L-amino acids
KKCPCSHTGSHNIVVINLDSGVSSANVIGLSSSLLKGHXMTGSALI

SEQ ID NO: 337 - protein, 791 aa, Homo sapiens
ISENAATEMRFPLPHAWDPDIGKNSLQSYELSPNTHFSLIVQNGADGSKYPELVLKRALDREEKAAHHLVLTASDGGDPVRTGTARIRVMVLDANDNAPAFAQPEYRASVPENLALGTQLLVVNATDPDEGVNAEVRYSFRYVEDKAAQVFKLDCNSGTISTIGELDHEESGFYQMEVQAMDNAGYSARAKVLITVLDVNDNAPEVVLTSLASSVPENSPRGTLIALLNVNDQDSEENGQVICFIQGNLPFKLEKSYGNYYSLVTDIVLDREQVPSYNITVTATDRGTPPLSTETHISLNVADTNDNPPVFPQASYSAYIPENNPRGVSLVSVTAHDPDCEENAQITYSLAENTIQGASLSSYVSINSDTGVLYALSSFDYEQFRDLQVKVMARDNGHPPLSSNVSLSLFVLDQNDNAPEILYPALPTDGSTGVELAPRSAEPGYLVTKVVAVDRDSGQNAWLSYRLLKASEPGLFSVGLHTGEVRTARALLDRDALKQSLVVAVQDHGQPPLSATVTLTVAVADSIPQVLADLGSLESPANSETSDLTLYLVVAVAAVSCVFLAFVILLLALRLRRWHKSRLLQASGGGLTGAPASHFVGVDGVQAFLQTYSHEVSLTTDSRKSHLIFPQPNYADMLVSQESFEKSEPLLLSGDSVFSKDSHGLIEQAPPNTDWRFSQAQRPGTSGSQNGDDTGTWPNNQFDTEMLQAMILASASEAADGSSTLGGGAGTMGLSARYGPQFTLQHVPDYRQNVYIPGSNATLTNAAGKRDGKAPAGGNGNKKKSGKKEKK

SEQ ID NO: 338 - protein, 79 aa, Homo sapiens
FWKSPVTDILHVTGQITFELSVLDNFLKFNLHFGGFFSQRSFVCFIKENFYQGTLAYRQARICDVLSGPSSSFCYPSHP

SEQ ID NO: 339 - protein, 452 aa, Homo sapiens
TRPSDPEGTCWLGAELITTNNSITGIVLYVVSCKADKNYSVNLENLKNLHKKRHHLSTVTSKGFAQYELFKSSALDDTITASQTAIALDISWSPVDEILQIPPLSSTATLNIKVESGEPRGPLNHLYRELKFLLVLADGLRTGVTEWLEPLEAKSAVELVQEFLNDLNKLDGFGDSTKKDTEVETLKHDTAAVDRSVKRLFKVRSDLDFAEQLWCKLFFSVISYQDLVKCFTLIIQSLQRGDIQPWLHSGSNSLLSKLIHQSYHGTMDTVSLSGTIPVQMLLEIGLDKLKKDYISFFIGQELASLNHLEYFIAPSVDIQEQVYRVQKLHHILEILVSCMPFIKSQHELLFSLTQICIKYYKQNPLDEQHIFQLPVRPTAVKNLYQSEKPQKWRVEIYSGQKKIKTVWQLSDSSPIDHLNFHKPDFSELTLNGSLERRIFFTNMVTCSQVHFK

SEQ ID NO: 340 - protein, 140 aa, Homo sapiens
ARDEGSTSWKAALEASKGCIKCEAPCPEDWLLYGRKCYFFSEEPRDWNTGRQYCHTHEAVLAVIQSQKELEFMFKFTRREPWIGLRRVGDEFHWVNGDPFDPDTFTIAGPGECVFVEPTRLVSTECLMTRPWVCSKMAYT

SEQ ID NO: 341 - protein, 176 aa, Homo sapiens
LRDSLLSTVISGAERKELPNAISIQGLSRTMEYHPDLENLDEDGYTQLHFDSQSNTRIAVVSEKGSCAASPPWRLIAVILGILCLVILVIAVVLGTMGVLSSPCPPNWIIYEKSCYLFSMSLNSWDGSKRQCWQLGSNLLKIDSSNELSLTLLPKLECSEAATSQAQVILPPQLPE

SEQ ID NO: 342 - protein, 254 aa, Homo sapiens
EKPLNDTVTEYEVISRENGSFSGKNKSIQMTNQTFSTVENLKPNTSYEFQVKPKNPLGEGPVSNTVAFSTESADPRVSEPVSAGRDAIWTERPFNSDSYSECKGKQYVKRTWYKKFVGVQLCNSLRYKIYLSDSLTGKFYNIGDQRGHGEDHCQFVDSFLDGRTGQQLTSDQLPIKEGYFRAVRQEPVQFGEIGGHTKSIMFSGMNVGLQFLENGRCCTKLPSVSSLQTKIIENTMPHSFKAILFTMYKSLQSN

SEQ ID NO: 343 - protein, 220 aa, Homo sapiens
  SITE (20): Xaa equals any of the naturally occurring L-amino acids
  SITE (25): Xaa equals any of the naturally occurring L-amino acids
EFLSFADDLLSGLGTSCVAXGRSHXEVPEVSIYSVIFKCLEPDGLYKFTLYAVDTRGRHSELSTVTLRTACPLVDDNKAEEIADKIYNLYNGYTSGKEQQMAYNTLMEVSASMLFRVQHHYNSHYEKFGDFVWRSEDELGPRKAHLILRRLERVSSHCSSLLRSAYIQSRVETVPYLFCRSEEVRPAGMVWYSILKDTKITCEEKMVSMARNTYGESKGR

SEQ ID NO: 344 - protein, 65 aa, Homo sapiens
KYINYVAKVSVKSMENKSCIILFEIRLLYSYIFIICYLFKKVKCYGLPSSNELKTFFPTVYKSST

SEQ ID NO: 345 - protein, 58 aa, Homo sapiens
  SITE (2): Xaa equals any of the naturally occurring L-amino acids
KXATAFLNLEPDRCYQVWVMAVNFTGCSLPSERAIFRTGKEMDAKGALEDNAQFFTDS

SEQ ID NO: 346 - protein, 195 aa, Homo sapiens
  SITE (171): Xaa equals any of the naturally occurring L-amino acids
  SITE (179): Xaa equals any of the naturally occurring L-amino acids
  SITE (192): Xaa equals any of the naturally occurring L-amino acids
WSKPEGCSPEEVITYTLEIQEDENDNLFHPKYTGEDLTCTVKNLKRSTQYKFRLTASNTEGKSCPSEVLVCTTSPDRPGPPTRPLVKGPVTSHGFSVKWDPPKDNGGSEILKYLLEITDGNSEANQWEVAYSGSATEYTFTHLKPGTLYKLRACCISTGGHSQCSESLPVXTLSIAPGXCRPPRVWVDQSTXKST

SEQ ID NO: 347 - protein, 76 aa, Homo sapiens
  SITE (76): Xaa equals any of the naturally occurring L-amino acids
HYRRYACRYRSGIPGSTHASEVIMTAYNIIGESPASAPVEVFVGEAAPAMAPQNVQVTPLTASQLEVTWDPPPPEX

SEQ ID NO: 348 - protein, 223 aa, Homo sapiens
  SITE (24): Xaa equals any of the naturally occurring L-amino acids
PQDSLYQELLQTTRWFIQLFLHHXAQAPLRGTVMQAPAVRQVNPQNSVTVRVPQTTTYVVNNGLTLGSTGPQLTVHHRPPQVHTEPPRPVHPAPLPEAPQPQRLPPEAASTSLPQKPHLKLARVQSQNGIVLSWSVLEVDRSCATVDSYHLYAYHEEPSATVPSQWKKIGEVKALPLPMACTLTQFVSGSKYYFAVRAKDIYGRFGPFCDPQSTDVISSTQSS

SEQ ID NO: 349 - protein, 164 aa, Homo sapiens
  SITE (52): Xaa equals any of the naturally occurring L-amino acids
  SITE (91): Xaa equals any of the naturally occurring L-amino acids
ARAETSSTHSESPVVVDLPDTPFIFKHTVNNSTAVISWTYALGKQPVSFYQXLLQEVAKTQENELPEAKNRPWIFNKILGTTVKLMELKPXTCYCLSVRAANTAGVGKWCKPYKFATLATDFSSFPENYPIQITVRRKEPRQKIVSSGPEEMPEAGGSGIPISW

SEQ ID NO: 350 - protein, 153 aa, Homo sapiens
  SITE (2): Xaa equals any of the naturally occurring L-amino acids
LXGQWESSSGAITAKTSFDFEQLRGFHFQVEGRDGGIPPRSATVTINLFVVDRNDNYPVILFPLPRNGSVPVEIVPRSARTGHLVTKVVAEDADSGSNAWLSYHISRASDSSLFRISANIGELRTARLVLPTDAVKQRVVVVVRDHGDPLPAS

SEQ ID NO: 351 - protein, 411 aa, Homo sapiens
TRPVVTARDGGSPSLWATARVSVEVADVNDNAPAFAQPEYTVFVKENNPPGCHIFTVSAWDADAQKNALVSYSLVERRVGEHALSSYVSVHAESGKVYALQPLDHEELELLQFQVSARDAGVPPLGSNVTLQVFVLDENDNAPALLATPAGSAGGAVSELVPRSVGAGHVVAKVRAVDADSGYNAWLSYELQPAAVGAHIPFHVGLYTGEISTTRILDEADAPRHRLLLRGKDHGEPALTSTATVLVSLVENGQAPKTSSRASVGAVDPEAALVDINVYLIIAICAVSSLLVLTLLLYTALRCSAPPTVSRCAPGKPTLVCSSAVGSWSYSQQRRQRVCSAESPPKTDLMAFSPSLQLSREDCLNPPSENQRQEKCPLQSVRVSTATAGPLNTDQATPNNPVPVSCPTNSL

SEQ ID NO: 352 - protein, 145 aa, Homo sapiens
GTSEICGFKIHGQNVPFDAVVVDKSTGEGVIRSKEKLDCELQKDYSFTIQAYDCGKGPDGTNVKKSHKATVHIQVNDVNEYAPVFKEKSYKATVIEGKQYDSILRVEAVDADCSPQFSQICSYEIITPDVPFTVDKDGYIKKKKK

SEQ ID NO: 353 - protein, 373 aa, Homo sapiens
PDVKTSGCSTAPRLEPQEPNSATSTTIAVYWSMNKEDVIDSFQVYCMEEPQDDQEVNELVEEYRLTVKESYCIFEDLEPDRCYQVWVMAVNFTGCSLPSERAIFRTAPSTPVIRAEDCTVCWNTATIRWRPTTPEATETYTLEYCRQHSPEGEGLRSFSGIKGLQLKVNLQPNDNYFFYVRAINAFGTSEQSEAALISTRGTRFLLLRETAHPALHISSSGTVISFGERRRLTEIPSVLGEELPSCGQHYWETTVTDCPAYRLGICSSSAVQAGALGQGETSWYMHCSEPQRYTFFYSGIVSDVHVTERPARVGILLDYNNQRLIFINAESEQLLFIIRHRFNEGVHPAFALEKPGKCTLHLGIEPPDSVRHK

SEQ ID NO: 354 - protein, 144 aa, Homo sapiens
  SITE (2): Xaa equals any of the naturally occurring L-amino acids
  SITE (109): Xaa equals any of the naturally occurring L-amino acids
  SITE (127): Xaa equals any of the naturally occurring L-amino acids
KXETPSNPVATVKAGERQWCDVGIFKNNTALVSQFYLLPKGKQSISKVGNADVPDYSLLKKQDLVPGTGYRFRVAAINGCGIGPFSKISEFKTCIPGFPGAPSAVRISXNVEGIHLSWEPPTSPSGXYFGIFSLLGYPHSTDTR

SEQ ID NO: 355 - protein, 185 aa, Homo sapiens
  SITE (29): Xaa equals any of the naturally occurring L-amino acids
  SITE (151): Xaa equals any of the naturally occurring L-amino acids
  SITE (185): Xaa equals any of the naturally occurring L-amino acids
CQRTQSHTLSGPGIRGASPIWTGLSKPLXLQSREVPRHLCCRNPEWLFRIYQDTKVDIPSLIQTIRRVVKGRPGPRKQKWTVGLYPGKVREARCQASVHGASEARLTVSWQIPWNLKYLKVREVKYEVWLQEQGENTYVPYILALQNHTFXENIKPFTTYLVWVRCIFNKILLGPFCRCCLVLQX

SEQ ID NO: 356 - protein, 107 aa, Homo sapiens
MDGAQGRLLPVSSRHSNLALLKPTSRDLTAPPEGASLMTVGGITAPRDVQVWNPRTWESVTLRGKRDPAPVLQFRISWWGDDRGWLRWALSNHGGPYKGRGVTRVCA

SEQ ID NO: 357 - protein, 105 aa, Homo sapiens
DVVDPYVYVEIHGIPADCAEQRTKTVHQNGDAPIFDESFEFQINLPELAMVRFVVLDDDYIGDEFIGQYTIPFECLQTGYRHVPLQSLTGEVLAHASLFVHVAIT

SEQ ID NO: 358 - protein, 140 aa, Homo sapiens
  SITE (122): Xaa equals any of the naturally occurring L-amino acids
  SITE (131): Xaa equals any of the naturally occurring L-amino acids
YPAVGAREDRMSHPSGPYSQASAAAPQPAAARQPPPPEEEEEEANSYDSDEATTLGALEFSLLYDQDNSSLQCTIIKAKGLKPMDSNGLADPYVKLHLLPGASKSNKLRTKTLRDYPDPHLXMRTLVFSRXFTDGGHGKR

SEQ ID NO: 359 - protein, 267 aa, Homo sapiens
  SITE (1): Xaa equals any of the naturally occurring L-amino acids
  SITE (2): Xaa equals any of the naturally occurring L-amino acids
  SITE (5): Xaa equals any of the naturally occurring L-amino acids
XXQLXLTKGNKSWSSTAVAAALELVDPPGCRNSARGFMRVSLLPDEQIVGISRIQRNAYSIFFDEKFSIPLDPTALEEKSLRFSVFGIDEDERNVSTGVVELKLSVLDLPLQPFSGWLYLQDQNKAADAVGEILLSLSYLPTAERLTVVVVKAKNLIWTNDKTTADPFVKVYLLQDGRKMSKKKTAVKRDDPNPVFNEAMIFSVPAIVLQDLSLRVTVAESSSDGRGDNVGHVIIGPSASGMGTTHWNQMLATLRRPVSMWHAVRRN

SEQ ID NO: 360 - protein, 179 aa, Homo sapiens
  SITE (73): Xaa equals any of the naturally occurring L-amino acids
ARLSQVPPSPDDLPSRGLLALSLKYVPAGSEGAGLPPSGELHFWVKEARDLLPLRAGSLDTYVQCFVLPDDSXASRQRTRVVRRSLSPVFNHTMVYDGFGPADLRQACAELSLWDHGALANRQLGGTRLSLGTGSSYGLQVPWMDSTPEEKQLWQALLEQPCEWVDGLLPLRTNLAPRT

SEQ ID NO: 361 - protein, 125 aa, Homo sapiens
  SITE (122): Xaa equals any of the naturally occurring L-amino acids
LEPEKLVHHILQDMYKTKKKKTRVILRMLPISGTCKAFLEDMKKYAETFLEPWFKAPNKGTFQIVYKSRNNSHVNREEVIRELAGIVCTLNSENKVDLTNPQYTVVVEIIQSCLLPECCERXHVV

SEQ ID NO: 362 - protein, 191 aa, Homo sapiens
  SITE (160): Xaa equals any of the naturally occurring L-amino acids
  SITE (179): Xaa equals any of the naturally occurring L-amino acids
  SITE (191): Xaa equals any of the naturally occurring L-amino acids
QRVAAPGSLHNPVASLSSPSTSGQGRAEKATMATLLSHPQQRPPFLRQAIKIRRRRVRDLQDPPPQMAPEIQPPSHHFSPEQRALLYEDALYTVLHRLGHPEPNHVTEASELLRYLQEAFHVEPEEHQQTLQRVRELEKPIFCLKATVKQAKGILGKDVXGFSDPYCLLGIEQGVSVPXGSPGSRHRRRLX

SEQ ID NO: 363 - protein, 297 aa, Homo sapiens
  SITE (5): Xaa equals any of the naturally occurring L-amino acids
VPILXKSVKDLQRCTVSLARYRVVVKEEMDASIKKMKQAFAELESCLMDREVALLAEMDKVKAEAMEILLSRQKKAELLKKMTHVAVQMSEQQLVELRADIKHFVSERKYDEDLGRVARFTCDVETLKKSIDSFGQVSHPKNSYSTRSRCSSVTSVSLSSPSDASAASSSTCASPPSLTSANKKNFAPGETPAAIANSSGQPYQPLREVLPGNRRGGQGYRPQGQKSNDPMNQGRHDSMGRYRNSSWYSSGSRYQSAPSQAPGNTIERALAARTSCRSSTRTTPAAPDCLPAVQVCE

SEQ ID NO: 364 - protein, 295 aa, Homo sapiens
  SITE (178): Xaa equals any of the naturally occurring L-amino acids
  SITE (188): Xaa equals any of the naturally occurring L-amino acids
  SITE (189): Xaa equals any of the naturally occurring L-amino acids
  SITE (283): Xaa equals any of the naturally occurring L-amino acids
  SITE (285): Xaa equals any of the naturally occurring L-amino acids
  SITE (286): Xaa equals any of the naturally occurring L-amino acids
SGEAGTGAPCGRISFALRYLYGSDQLVVRILQALDLPAKDSNGFSDPYVKIYLLPDRKKKFQTKVHRKTLNPVFNETFQFSVPLAELAQRKLHFSVYDFDRFSRHDLIGQVVLDNLLELAEQPPDRPLWRDIVEGGSEKADLGELNFSLCYLPTAGRLTVTIIKASNLKAMDLTGFSXPYVKASLISXXRRLKKRKTSIKKNTLNPTYNEALVFDVAPESVENVGLSIAVVDYDCIGHNEVIGVCRVGPDAADPHGREHWAEMLANPRKPVEHWHQLVEEKLXPXXQKEQRLFRG

SEQ ID NO: 365 - protein, 461 aa, Homo sapiens
ASCPIRADPARDAAPGGCLAEAGARAESSSPERLCWMPWRNKEASSPSSANPPLEALQSPSFRGNMADKLKDPSTLGFLEAAVKISHTSPDIPAEVQMSVKEHIMRHTRLQRQTTEPASSTRHTSFKRHLPRQMHVSSVDYGNELPPAAEQPTSIGRIKPELYKQKSVDGEDAKSEATKSCGKINFSLRYDYETETLIVRILKAFDLPAKDFCGSSDPYVKIYLLPDRKCKLQTRVHRKTLNPTFDENFHFPVPYEELADRKLHLSVFDFDRFSRHDMIGEVILDNLFEASDLSRETSIWKDIQYATSESVDLGEIMFSLCYLPTAGRLTLTVIKCRNLKAMDITGYSDPYVKVSLLCDGRRLKKKKTTIKKNTLNPVYNEAIIFDIPPENMDQVSLLISVMDYDRVGHNEIIGVCRVGITAEGLGRDHWNEMLAYPRKPIAHWHSLVEVKKSFKEGNPRL

SEQ ID NO: 366 - protein, 132 aa, Homo sapiens
  SITE (76): Xaa equals any of the naturally occurring L-amino acids
  SITE (85): Xaa equals any of the naturally occurring L-amino acids
  SITE (102): Xaa equals any of the naturally occurring L-amino acids
RKWKKRKTATKKGTAAPYFNEAFTFLVPFSQVQNVDLVLAVWDRSLPLRTEPVGKVHLGARASGQPLQHWADMLAXARRPLPSGXPCGSQGGGPHAGPAAPXSPAPALAPLLNAPHASVSPLSPGTCPGRPA

SEQ ID NO: 367 - protein, 234 aa, Homo sapiens
TRECHQLAYADEAKKRSNPYVKTYLLPDKSRQGKRKTSIKRDTVNPLYDETLRYEIPESLLAQRTLQFSVWHHGRFGRNTFLGEAEIQMDSWKLDKKLDHCLPLHGKISAESPTGLPSHKGELVVSLKYIPASKTPVGGDRKKSKGGEGGELQVWIKEAKNLTAAKAGGTSDSFVKGYLLPMRNKASKRKTPVMKKTLNPHYNHTFVYNGVRLEDLQHMCLELTVWDPGAPGQQ

SEQ ID NO: 368 - protein, 188 aa, Homo sapiens
  SITE (1): Xaa equals any of the naturally occurring L-amino acids
  SITE (2): Xaa equals any of the naturally occurring L-amino acids
  SITE (10): Xaa equals any of the naturally occurring L-amino acids
  SITE (24): Xaa equals any of the naturally occurring L-amino acids
XXVLSFDRFXRDDVIGEVMVPLAXVDPSTGKVQLTRDIIKRNIQKCISRGELQVSLSYQPVAQRMTVVVLKARHLPKMDITGLSGNPYVKVNVYYGRKRIAKKKTHVKKCTLNPIFNESFIYDIPTDLLPDISIEFLVIDFDRTTKNEVVGRLILGAHSVTASGAEHWREVCESPRKPVAKWHSLSEY

SEQ ID NO: 369 - protein, 268 aa, Homo sapiens
GTLVSESAQLEILSLKEVGDIKASTEMRLRRFQSVESGANNVVFIRTLGIEPEKLVHHILQDMYKTKKKKTRVILRMLPISGTCKAFLEDMKKYAETFLEPWFKAPNKGTFQIVYKSRNNSHVNREEVIRELAGIVCTLNSENKVDLTNPQYTVVVEIIKAVCCLSVVKDYMLFRKYNLQEVVKSPKDPSQLNSKQGNGKEAKLESADKSDQNNTAEGKNNQQVPENTEELGQTKPTSNPQVVNEGGAKPELASQATEGSKSNENDFS

SEQ ID NO: 370 - protein, 194 aa, Homo sapiens
  SITE (179): Xaa equals any of the naturally occurring L-amino acids
HRLLQAPQGHGGIARPRGLGICFSNWLEISLETTYSDTFRRRRWRRKMAPSETHGAAAIFKLEGALGADTTEDGDEKSLEKQKHSATTVFGANTPIVSCNFDRVYIYHLRCYVYQARNLLALDKDSFSDPYAHICFLHRSKTTEIIHSTLNPTWDQTIIFDEVEIYGEPKQFYRIHPKXSWNFLTMTKWAKMNF

SEQ ID NO: 371 - protein, 129 aa, Homo sapiens
  SITE (109): Xaa equals any of the naturally occurring L-amino acids
KHNFRATTECQALAYGAQGNYPKGLKHYGVSGKFIQGRQKTGLSVNAEASCAVRGQRGARVPSQGRCGALLHSGLAGLGSGGGESIGAPSQFHRGLGALAGDWGPLGEXVIETCQEALDKHVLKSWVAS

SEQ ID NO: 372 - protein, 136 aa, Homo sapiens
  SITE (83): Xaa equals any of the naturally occurring L-amino acids
MYSTQQGGLIVGIIRCVHLAAMDANGYSDPFVKLWLKPDMGKKAKHKTQIKKKTLNPEFNEEFFYDIKHSDLAKKSLDISVWXYDIGKSNDYIGGCQLGISAKGERLKHWYECLKNKDKKIERWHQLQNENHVSSD

SEQ ID NO: 373 - protein, 76 aa, Homo sapiens
  SITE (62): Xaa equals any of the naturally occurring L-amino acids
EVIEGRQLSGNNIRPVVKVHVCGQTHRTRIKRGNNPFFDELFFYNVNMTPSELMDEIISIRXYNSHSLRADCLMGI

SEQ ID NO: 374 - protein, 308 aa, Homo sapiens
  SITE (126): Xaa equals any of the naturally occurring L-amino acids
  SITE (192): Xaa equals any of the naturally occurring L-amino acids
  SITE (220): Xaa equals any of the naturally occurring L-amino acids
  SITE (224): Xaa equals any of the naturally occurring L-amino acids
  SITE (278): Xaa equals any of the naturally occurring L-amino acids
CLAHLELPVDPEVKALVPDRATAVLDRACLEPVAAGRGQPESHVAVRGGHCGKEQVPSGGQEPFPAAQTHFLPSPRAPCGLRLRGRGSGGQRQSPSCHLPPRSSSQLPPLGPAHRPTRLHQIQPQXPPPQHPPPPSAQHRGQGGAHSPRSLEGRRWACRTRTVSRQVLDTSACRGGRGETCYGPMKPRVTGXTKEAGAVPQGLILNPRPILHLIRILNQXEETXYLHHDACQHLHNALRRLWAKGFAYINSFIAQPPYAQILFTMAHSTRKLRHREAXTCLRSTIGVGARAGWLQIYASHRPASTFSG

SEQ ID NO: 375 - protein, 407 aa, Homo sapiens
AEMGAPAMALAQGANLKNQAKVDNQPEELVRSAEDDEKPDQKPVTNECVPRISTVPTQPDNPFSHPDKLKRMSKSVPAFLQDEVSGSVMSVYSGDFGNLEVKGNIQFAIEYVESLKELHVFVAQCKDLAAADVKKQRSDPYVKAYLLPDKGKMGKKKTLVVKKTLNPVYNEILRYKIEKQILKTQKLNLSIWHRDTFKRNSFLGEVELDLETWDWDNKQNKQLRWYPLKRKTAPVALEAENRGEMKLALQYVPEPVPGKKLPTTGEVHIWVKECLDLPLLRGSHLNSFVKCTILPDTSRKSRQKTRAVGKTTNPIFNHTMVYDGFRPEDLMEACVELTVWDHYKLTNQFLGGLRIGFGTGKSYGTEVDWMDSTSEEVALWEKMVNSPNTWIEATLPLRMLLIAKISK

SEQ ID NO: 376 - protein, 308 aa, Homo sapiens
  SITE (303): Xaa equals any of the naturally occurring L-amino acids
QLSPSQAPAGAQEVARRVTVGSASHGGRRSTMATTVSTQRGPVYIGELPQDFLRITPTQQQRQVQLDAQAAQQLQYGGAVGTVGRLNITVVQAKLAKNYGMTRMDPYCRLRLGYAVYETPTAHNGAKNPRWNKVIHCTVPPGVDSFYLEIFDERAFSMDDRIAWTHITIPESLRQGKVEDKWYSLSGRQGDDKEGMINLVMSYALLPAAMVMPPQPVVLMPTVYQQGVGYVPITGMPAVCSPGMVPVALPPAAVNAQPRCSEEDLKAIQDMFPNMDQEVIRSCWKPSEGTRMPPSTSLLQDGXRAIEP

SEQ ID NO: 377 - protein, 158 aa, Homo sapiens
  SITE (29): Xaa equals any of the naturally occurring L-amino acids
  SITE (34): Xaa equals any of the naturally occurring L-amino acids
  SITE (89): Xaa equals any of the naturally occurring L-amino acids
  SITE (115): Xaa equals any of the naturally occurring L-amino acids
  SITE (122): Xaa equals any of the naturally occurring L-amino acids
  SITE (137): Xaa equals any of the naturally occurring L-amino acids
LQVISGQQLPKVDKTKEGSIVDPLVKVQXFGVRXDTARQETNYVENNGFNPYWGQTLCFRVLVPELAMLRFVVMDYDWKSRNDFIGQYXLPWTCMQQGEPAPLTPGQYPSSGCLXNAVLLPXPGYRHIHLLSKDGIXLSPASIFVYICIQEGLEGDES

SEQ ID NO: 378 - protein, 148 aa, Homo sapiens
LKAMDSNGLSDPYVKFRLGHQKYKSKIMPKTLNPQWREQFDFHLYEERGGVIDITAWDKDAGKRDDFIGRCQVDLSALSREQTHKLELQLEEGEGHLVLLVTLTASATVSISDLSVNSLEDQKEREEILKRYSPLRIFHNLKDVGFLQ

SEQ ID NO: 379 - protein, 165 aa, Homo sapiens
  SITE (70): Xaa equals any of the naturally occurring L-amino acids
TMRTCDSPRRRRRCMPSCKKCFWSNKRSACCLQAVMHQGNVAETTRFEKLAQDRKKQLEILQLAQAQGLXPPTHHFELKTFQTVRIFSELNSTEMHLIIVRGMNLPAPPGVTPDDLDAFVRFEFHYPNSDQAQKSKTAVVKNTNSPEFDQLFKLNINRNHRGFKR

SEQ ID NO: 380 - protein, 105 aa, Homo sapiens
  SITE (84): Xaa equals any of the naturally occurring L-amino acids
  SITE (101): Xaa equals any of the naturally occurring L-amino acids
  SITE (105): Xaa equals any of the naturally occurring L-amino acids
EHPGQELEIELFDEDPDKDDFLGSLMIDLIEVEKERLLDEWFTLDEVPKGKLHLRLEWLTLMPNASNLDKVLTDIKADKDQANXGLSSALLILLLGIPARXPSGX

SEQ ID NO: 381 - protein, 107 aa, Homo sapiens
  SITE (72): Xaa equals any of the naturally occurring L-amino acids
  SITE (99): Xaa equals any of the naturally occurring L-amino acids
  SITE (103): Xaa equals any of the naturally occurring L-amino acids
IPKFKIGGKEVFRSKIIHKNLNPVWEEKACILVDHLREPLYIKVFDYDFGLQDDFMGSAFLDLTQLELNRPXDVTLTLKDPHYPGPWILESILLSVHPXPLKXRRVP

SEQ ID NO: 382 - protein, 209 aa, Homo sapiens
  SITE (189): Xaa equals any of the naturally occurring L-amino acids
  SITE (193): Xaa equals any of the naturally occurring L-amino acids
  SITE (194): Xaa equals any of the naturally occurring L-amino acids
  SITE (208): Xaa equals any of the naturally occurring L-amino acids
NFSPRAVRPGAPAPESPLRLLKLAFYQLRTMLRVIVESASNIPKTKFGKPDPIVSVIFKDEKKKTKKVDNELNPVWNEILEFDLRGIPLDFSSSLGIIVKDFETIGQNKLIGTATVALKDLTGDQSRSLPYKLISLLNEKGQDTGATIDLVIGYDPPSAPHPNDLSGPSVPGMGGDGEEDESDEDRLDXHSGXXAKGQFGDVSEVHLXG

SEQ ID NO: 383 - protein, 60 aa, Homo sapiens
  SITE (42): Xaa equals any of the naturally occurring L-amino acids
  SITE (49): Xaa equals any of the naturally occurring L-amino acids
TENFAEMKFPCWYTFVNHSIENQHKAIAFLNVFIKTRIISAXHLPMHMXNPGYAFPDGKY

SEQ ID NO: 384 - protein, 125 aa, Homo sapiens
  SITE (27): Xaa equals any of the naturally occurring L-amino acids
GPVKLRLTVLCAKNLVKKDFFRLPDPXAKVVVDGSGQCHSTDTVKNTLDPKWNQHYDLYIGKSDSVTISVWNHKKIHKKQGAGFLGCVRLLSNAINRLKDTGYQRLDLCKLGPNDNDTVRGQIVV

SEQ ID NO: 385 - protein, 500 aa, Homo sapiens
  SITE (80): Xaa equals any of the naturally occurring L-amino acids
EAEQPCGPHSPAQSPTLKNSPVGISPNSQSAPQSHIHQSPAAAGLPRGPQEAAPAGRTASQAEKRRGGCQDAPAPSQGTXAYAGGLAQWAAVDITKVPPAPVNKDDFALVQRPGPGLSQEAARRYGELTKLIRQQHEMCLNHSNQFTQLGNITETTKFEKLAEDCKRSMDILKQAFVRGLPTPTARFEQRTFSVIKIFPDLSSNDMLLFIVKGINLPTPPGLSPGDLDVFVRFDFPYPNVEEAQKDKTSVIKNTDSPEFKEQFKLCINRSHRGFRRAIQTKGIKFEVVHKGGLFKTDRVLGTAQLKLDALEIACEVREILEVLDGRRPTGGRLEVMVRIREPLTAQQLEMTTERWLVIDPVPAAVPTQVAGPKGKAPPVPAPARESGNRSARPLHSLSVLAFDQERLERKILALRQARRPVPPEVAQQYQDIMQRSQWQRAQLEQGGVGIRREYAAQLERQLQFYTEAARRLGNDGSRDAAKEALYRRNLVESELQRLRR

SEQ ID NO: 386 - protein, 540 aa, Homo sapiens
  SITE (36): Xaa equals any of the naturally occurring L-amino acids
  SITE (449): Xaa equals any of the naturally occurring L-amino acids
TQDMAAQCVTKVALNVSCANLLDKDIGSKSDPLCVXFLNTSGQQWYEVERTERIKNCLNPQFSKTFIIDYYFEVVQKLKFGVYDIDNKTIELSDDDFLGECECTLGQIVSSKKLTRPLVMKTGRPAGKGSITISAEEIKDNRVVLFEMEARKLDNKDLFGKSDPYLEFHKQTSDGNWLMVHRTEVVKNNLNPVWRPFKISLNSLCYGDMDKTIKVECYDYDNDGSHDLIGTFQTTMTKLKEASRSSPVEFECINEKKRQKKKSYKNSGVISVKQCEITVECTFLDYIMGGCQLNFTVGVDFTGSNGDPRSPDSLHYISPNGVNEYLTALWSVGLVIQDYDADKMFPAFGFGAQIPPQWQVSHEFPMNFNPSNPYCNGIQGIVEAYRSCLPQIKLYGPTNFSPIINHVARFAAAATQQQTASQYFVLLIITDGVITDLDETRQAIVNASXLPMSIIIVGVGGADFSAMEFLDGDGGSLRSPLGEVAIRDIVQFVPFRQFQNAPKEALAQCVLAEIPQQVVGYFNTYKLLPPKNPATKQQKQ

SEQ ID NO: 387 - protein, 61 aa, Homo sapiens
  SITE (37): Xaa equals any of the naturally occurring L-amino acids
RTATVWKTLCPFWGEEYQVHLPPTFHAVAFYVMDEDXLSRDDVIGKVCLTRDTIASHPKGF

SEQ ID NO: 388 - protein, 299 aa, Homo sapiens
  SITE (22): Xaa equals any of the naturally occurring L-amino acids
  SITE (26): Xaa equals any of the naturally occurring L-amino acids
  SITE (197): Xaa equals any of the naturally occurring L-amino acids
  SITE (285): Xaa equals any of the naturally occurring L-amino acids
  SITE (286): Xaa equals any of the naturally occurring L-amino acids
  SITE (289): Xaa equals any of the naturally occurring L-amino acids
  SITE (296): Xaa equals any of the naturally occurring L-amino acids
PLRPSALQGPDTETSIVKKSCXPRWXETFEFELQEGAMEALCVEAWDWDLVSRNDFLGKVVIDVQRLRVVQQEEGWFRLQPDQSKSRRHDEGNLGSLQLEVRLRDETVLPSSYYQPLVHLLCHEVKLGMQGPGQLIPLIEETTSTECRQDVATNLLKLFLGQGLAKDFLDLLFQLELSRTSETNTLFRSNSLASKSXESFLKVAGMQYLHGVLGPIINKVFEEKKYVELDPSKVEVKDVGCSGLHRPQTEAEVLEQSAQTLRAHLGALLSALSRSVRACPAVVRXXFRXLFRRVRXRFP

SEQ ID NO: 389 - protein, 56 aa, Homo sapiens
KGYSSWDRLGFLSFMFLSFPHDNQIIIRNKMLRIQRWLYVNTVLIGQRRKSMRSIH

SEQ ID NO: 390 - protein, 191 aa, Homo sapiens
  SITE (124): Xaa equals any of the naturally occurring L-amino acids
  SITE (157): Xaa equals any of the naturally occurring L-amino acids
  SITE (177): Xaa equals any of the naturally occurring L-amino acids
FGTSPKGTVQAWGVFLALPPRPSSSPEMRGKRRRKWWLRTGGGKPRAYCRLSLNDSEVDMFGDYDSFTENSFIAQVDDLEQKYMQLPEHKKHATDFATENLCSESIKNKLSITTIGNLTELQTXKHTENQSGYEGVTIEPGADLLYDVPSSQAIYFXNLQNSSNDLGDHSMKDRDWXSSSHNTVNEELPHN

SEQ ID NO: 391 - protein, 179 aa, Homo sapiens
  SITE (27): Xaa equals any of the naturally occurring L-amino acids
  SITE (29): Xaa equals any of the naturally occurring L-amino acids
  SITE (35): Xaa equals any of the naturally occurring L-amino acids
  SITE (39): Xaa equals any of the naturally occurring L-amino acids
  SITE (148): Xaa equals any of the naturally occurring L-amino acids
CRSSKDAVGQISVHVDITATPGTGDHXVXVKVIAXNDLXWQTTAMFRPFVEVCILGPNLGDKKRKQGTKTKSNTWSPKYNETFQFILGKENRPGAYELHLSVKDYCFAREDRIIGMTVIQLQNIAEKGSYGAWYPLLKNISMDETGLXILRILSQRTSDDVAKEFVRLKSETRSTEESA

SEQ ID NO: 392 - protein, 101 aa, Homo sapiens
SQLPPSPGGHEQQQATAPPSHRGGLGAEAGFGACGLRVSCPGCLVLSGLRPFQVSDPYVILPWLSPAPLGCNCFLHTKPLIGASGPSQKNLPRALGFMLSE

SEQ ID NO: 393 - protein, 363 aa, Homo sapiens
  SITE (29): Xaa equals any of the naturally occurring L-amino acids
  SITE (294): Xaa equals any of the naturally occurring L-amino acids
  SITE (312): Xaa equals any of the naturally occurring L-amino acids
  SITE (316): Xaa equals any of the naturally occurring L-amino acids
  SITE (323): Xaa equals any of the naturally occurring L-amino acids
  SITE (335): Xaa equals any of the naturally occurring L-amino acids
SYQKLSKISVVPPTPPPVSESQCSRSPGXLQEFGQFRGFNKSVENLFLSLATHVKKLSKSQNDMTSEKHLLATGPRQCVGQTERRSQSDTAVNVTTRKVSAPDILKPLNQEDPKCSTNPILKQQNLPSSPAPSTIFSGGFRHGSLISIDSTCTEMGNFDNANVTGEIEFAIHYCFKTHSLEICIKACKNLAYGEEKKKKCNPYVKTYLLPDRSSQGKRKTGVQRNTVDPTFQETLKYQVAPAQLVTRQLQVSVWHLGTLARRVFLGEVIIPLATWDFEDSTTQSFRWHPLRAKXEKYEDSVPQSNGELTVRXKLVXPSRPRKXQEAQEGTDQPSXHGQLCLVVLGAKNLPVRPDGTLNSFVKG

SEQ ID NO: 394 - protein, 77 aa, Homo sapiens
  SITE (7): Xaa equals any of the naturally occurring L-amino acids
  SITE (17): Xaa equals any of the naturally occurring L-amino acids
  SITE (52): Xaa equals any of the naturally occurring L-amino acids
  SITE (67): Xaa equals any of the naturally occurring L-amino acids
  SITE (70): Xaa equals any of the naturally occurring L-amino acids
KMFCSFXINYARQLHYXSACNLPFICNKKIINTAGTSNAEVPLADPGMYQLXITLRRGQSLAARDRXGTXDPYVKFK

SEQ ID NO: 395 - protein, 209 aa, Homo sapiens
  SITE (90): Xaa equals any of the naturally occurring L-amino acids
  SITE (106): Xaa equals any of the naturally occurring L-amino acids
  SITE (158): Xaa equals any of the naturally occurring L-amino acids
  SITE (160): Xaa equals any of the naturally occurring L-amino acids
  SITE (178): Xaa equals any of the naturally occurring L-amino acids
  SITE (182): Xaa equals any of the naturally occurring L-amino acids
AISPGFPFCPLLLTPVAWGLVGAIAYAGVLGTIELKLDLVLLGAVAAVSSFLPFLWKAWAGWGSKRPLATLFPIPGPVLLLLLFRLAVFXSDSFVVAEARATPFLXGSFILLLVVQLHWEGQLLPPKLLTMPRLGTSATTNPPRHNGAYALRLGIGVXLXTRLAGLFHRCPEETPVCXSSPXLSPLASMVGGRAKNLWYGTCVAALVAL

SEQ ID NO: 396 - protein, 196 aa, Homo sapiens
FAIKLQNLQTVRLVFKIQTQTPRKKTIGECSMSLRTLSTQEMDYSLDITPPSKISVCHAELELGTCFQAVNSRIQLQILEARYLPSSSTPLTLSFFVKVGMFSSGELIYKKKTRLLKASNGRVKWGETMIFPLIQSEKEIVFLIKLYSRSSVRRKHFVGQIWISEDSNNIEAVNQWKETVINPEKVVIRWHKLNPS

SEQ ID NO: 397 - protein, 57 aa, Homo sapiens
HLHSSPLASLKRNTFPPFWNEETIYNFICTFIHNTLFFPFDPLINLVGSLLLFLLCS

SEQ ID NO: 398 - protein, 71 aa, Homo sapiens
AVCSLVRNTSAVGQAARRRRNQRIANYKRNKALSPRPSKASPGDPYPRFGENAEAQKNSVESGRPKPPRQV

SEQ ID NO: 399 - protein, 77 aa, Homo sapiens
PCDPPASASQSAGITGVSPAPDPNFLFLIMWWPKNTAPHIFFTDGLNPNRCSCCIYAPPEPPHLPFFKWTYSFSLSQ

SEQ ID NO: 400 - protein, 111 aa, Homo sapiens
GLTLRLFLPGKSRCWDWMTVKLSTRSHALLSLRPGQARGVVKSIIIAGKGISSSKVFTSTRCGPPVCNTCSGLLGKRGQSYVGVLVVQYSRVCREFLRTSTSWWVPAFPIN

SEQ ID NO: 401 - protein, 160 aa, Homo sapiens
  SITE (4): Xaa equals any of the naturally occurring L-amino acids
SDSXSVNLPFPVLTHTALLPSLDLITLPGTPSPTTAKSQTQKLLHPHSPSSFQLQMTPVLKEASSRGLCSQASATPPTSTQACSLIFKNSPLNPRFQHVPIPFSVKLLKKTICPPSLSLSHLPSSTHFAGSPLVKVANNLHVTKSKGHFAVRLVRTQQYL

SEQ ID NO: 402 - protein, 156 aa, Homo sapiens
VSAAERLRLGPPVACAPARGAEGTGSDSEMAASMFYGRLVAVATLRNHRPRTAQRAAAQVMPSSPLSSRGSAGERVRCEGSRGPARGHFAGSDIFWVPCKALGRLAWECCSPGLRASPCLRGSDPALSPPGSPAARPWLLLQFLRDGREQVGSEWR

SEQ ID NO: 403 - protein, 39 aa, Homo sapiens
SKNSSSSGITHANYWTLPQIHRIGDWGWGLAFCFNKSSR

SEQ ID NO: 404 - protein, 82 aa, Homo sapiens
HLRRSGNRNRLNYPARHHPSPHRPPIPTHPLHNRRGQRSLPYHQINWPPMVLNLRVHRLRRTNLQLLHTSPIIPRTRRPATP

SEQ ID NO: 405 - protein, 755 aa, Homo sapiens
  SITE (102): Xaa equals any of the naturally occurring L-amino acids
  SITE (706): Xaa equals any of the naturally occurring L-amino acids
  SITE (752): Xaa equals any of the naturally occurring L-amino acids
QELLQCYLKDFILLTMRVSTEEELKFLQMALWSCTRKLKAASEAPEEEVSLPWVHLAYQRFRSRLQNFSRILTIYPQVLHSLMEARWNHELAGCEMTLDAFXAMACTEMLTRNTLKPSPQAWLQLVKNLSMPLELICSDEHMQGSGSLAQAVIREVRAQWSRIFSTALFVEHVLLGTESRVPELQGLVTEHVFLLDKCLRENSDVKTHGPFEAVMRTLCECKETASKTLSRFGIQPCSICLGDAKDPVCLPCDHVHCLRCLRAWFASEQMICPYCLTALPDEFSPAVSQAHREAIEKHARFRQMCNSFFVDLVSTICFKDNAPPEKEVIESLLSLLFVQKGRLRDAAQRHCEHTKSLSPFNDVVDKTPVIRSVILKLLLKYSFHDVKDYIQEYLTLLKKKAFITEDKTELYMLFINCLEDSILEKTSAYSRNDELNHLEEEGRFLKAYSPASRGREPANEASVEYLQEVARIRLCLDRAADFLSEPEGGPEMAKEKQCYLQQVKQFCIRVENDWHRVYLVRKLSSQRGMEFVQGLSKPGRPHQWVFPKDVVKQQGLRQDHPGQMDRYLVYGDEYKALRDAVAKAVLECKPLGIKTALKACKTPQSQQSAYFLLTLFREVAILYRSHNASLHPTPEQCEAVSKFIGECKILSPPDISRFATSLVDNSVPLLRAGPSDSNLDGTVTEMAIHAAAVLLCGQNELLEPLXNLAFSPATMAHAFLPTMPEDLLAQARRWKGLERVHWYSKCWGLDDXTLL

SEQ ID NO: 406 - protein, 162 aa, Homo sapiens
ILTYKETGPQTGNSLVQASARRKDTMTAPCWAQPGSLAKCLLEAVPARGLQQGDSLPSGHYQYCLYLEVGKRSPLRQQDNGQFREGEGSKRFRGHRSQRTPPRPTAGSAWKIHLLGTFWQPDGSNSPLGLIPSSKSWLQMSLSSPYWRAPPDSWAQFISSPF

SEQ ID NO: 407 - protein, 119 aa, Homo sapiens
SAHLCLPKCWDYRHEPPCWARSNFFKDEKQSKIYGQGCSKRLSAVCSQGGNFRFLDLLWIGRKEGKGGAWGKKEGKRIEGRVRTSWRRTQEGQRFGRFLAPISEFYSTVNMTTISSKWW

SEQ ID NO: 408 - protein, 123 aa, Homo sapiens
  SITE (105): Xaa equals any of the naturally occurring L-amino acids
  SITE (123): Xaa equals any of the naturally occurring L-amino acids
GTAHMIEADVLLPSDGSEHSQPIMAHPPETNSDNTLQEWLTEVMKSNKGIKLDFKSLAVVEPSMMLLENVKRHLKRPVWINADILPGPNGNSKVIDAKPFLDTVXILLSRRDVFPGLDNRMAX

SEQ ID NO: 409 - protein, 399 aa, Homo sapiens
  SITE (24): Xaa equals any of the naturally occurring L-amino acids
  SITE (125): Xaa equals any of the naturally occurring L-amino acids
  SITE (225): Xaa equals any of the naturally occurring L-amino acids
  SITE (277): Xaa equals any of the naturally occurring L-amino acids
  SITE (284): Xaa equals any of the naturally occurring L-amino acids
  SITE (286): Xaa equals any of the naturally occurring L-amino acids
  SITE (291): Xaa equals any of the naturally occurring L-amino acids
  SITE (292): Xaa equals any of the naturally occurring L-amino acids
  SITE (302): Xaa equals any of the naturally occurring L-amino acids
  SITE (306): Xaa equals any of the naturally occurring L-amino acids
  SITE (308): Xaa equals any of the naturally occurring L-amino acids
  SITE (311): Xaa equals any of the naturally occurring L-amino acids
  SITE (314): Xaa equals any of the naturally occurring L-amino acids
  SITE (315): Xaa equals any of the naturally occurring L-amino acids
QRIKAKPQYKPPDDKMVHETSYSXQFKGEASKPTTADNKVIDRRRIRSLYSEPFKEPPKVEKPSVQSSKPKKTSASHKPTRKAKDKQAVSGQAAKKKSAEGPSTTKPDDKEQSKEMNNKLAEAKXSLAQPVSDSSKTQGPVATEPDKDQGSVVPGLLKGQGPMVQEPLKKQGSVVPGPPKDLGPMIPLPVKDQDHTVPEPLKNESPVISAPVKDQGPSVPVPPKXQSPMVPAKVKDQGSVVPESLKDQGPRIPEPVKNQAPMVPAPVKDEGPMVSAXVKDQGPXVXAPVKXXGPIVPAPVKXEGPXVXAPXKDXXPMVPEHPKMKSAMATAPIKNQGSMVSEPVKNQGLVVSGPVKDQDVVVPEHAKVHDSASCGTCKESRSCGPRVREESRPHSPSTS

SEQ ID NO: 410 - protein, 68 aa, Homo sapiens
HYCLSLASCQISGDLDCHRSVNPLVNCAWQRSRLHSPCENLMLDDLSLSPITPRWDRLVARKQVQGSH

SEQ ID NO: 411 - protein, 71 aa, Homo sapiens
  SITE (49): Xaa equals any of the naturally occurring L-amino acids
HLRRSGNRNRLNYPARHHPSPHRPPIPTHPLHNRRGQRSLPYHQSIGPXMVMNLRVHRLRRTNLQLYIFPP

SEQ ID NO: 412 - protein, 141 aa, Homo sapiens
  SITE (57): Xaa equals any of the naturally occurring L-amino acids
PPATSQAALPEALSKGRETPRPATHPARSQDVRPLSCPFDFLRDNVEWSEEQAAAAXEKSPGEQYPAGVARRNKLIMRSMPTNTGMTSTKSTKMGFSRIDIGFLPNSLSWHLAKNQNHLKDWFLETKSEVLNVETMRMDLV

SEQ ID NO: 413 - protein, 114 aa, Homo sapiens
  SITE (6): Xaa equals any of the naturally occurring L-amino acids
  SITE (12): Xaa equals any of the naturally occurring L-amino acids
  SITE (14): Xaa equals any of the naturally occurring L-amino acids
  SITE (24): Xaa equals any of the naturally occurring L-amino acids
  SITE (30): Xaa equals any of the naturally occurring L-amino acids
SAASMXRIPVAXPXPTKRGSAAMXFTSMKXVLVPRSPIGELINNKFAGLISKQPQHILDMCTGSGCIAIACAYAFPDAEVDAVDISPDALAVAEQNIEEHGLIHNVIPIVPICS

SEQ ID NO: 414 - protein, 211 aa, Homo sapiens
  SITE (81): Xaa equals any of the naturally occurring L-amino acids
  SITE (158): Xaa equals any of the naturally occurring L-amino acids
  SITE (204): Xaa equals any of the naturally occurring L-amino acids
TWSPPETLCRPPPLLLHPVHLQPAPRAPTLHPDLHPRRGSQRPPGVTTENVRGGQGGAQEEEEEKEGKEEKEEGEMVEQGXEEAGEEEEEEQDQKEVEAELCRPLLVCPLEGPEGVRGRECFLRVTSAHLFEVELQAARTLERLELQSLEAAEIEPEXQAQRSPRPTGSDLLPGAPILSLRFSYICPDRQLRRYLVLEPDAHAXSRSCLPC

SEQ ID NO: 415 - protein, 57 aa, Homo sapiens
  SITE (47): Xaa equals any of the naturally occurring L-amino acids
VFSVSQPLKVLGPGRHPVQDLALYFRSPQPFIPSKSMSDFGARKSGXALSLAAQVAS

SEQ ID NO: 416 - protein, 106 aa, Homo sapiens
  SITE (33): Xaa equals any of the naturally occurring L-amino acids
ESGHDQWGEATPSWGSEDLPAKQKFPNVDPEWXNNDPRDWAQMQDLRKLVIQGIKEYTPRTQNVSKAFEIQQEKEKTPFTFLQRLRDEKILQIRSGGPSRARPVAD

SEQ ID NO: 417 - protein, 191 aa, Homo sapiens
  SITE (176): Xaa equals any of the naturally occurring L-amino acids
GVSNRELDPLAAAAMAARSPPSPHPSPPARQLGPRSPRVGRGAEVHAMRSEASGFAGAAREVVADESDKIWVGEEGSGGRRGPGGAAPAHAPLLSAPMGSRRLEGISVEEAMVTRTQLLEEELSSLKEELALCQADKEFVWSLWKRLQVTNPDLTQVVSLVVEREKQKSEAKDRKXSRKFLQVKDAQIQEI

SEQ ID NO: 418 - protein, 102 aa, Homo sapiens
LSSSMDNFQPSPLFSLSPFSLSFPFFLFVSSFSLFFFFLIFVPFSSVVPSRTPIISILGHLKLSYSLMILFTYKKLLFLSMFHFEYFPPLCPQIQIYVFCNI

SEQ ID NO: 419 - protein, 366 aa, Homo sapiens
HELISHSDTIQAILRCQDVSAGSLQELALLTGIISKAALPGILSELDVDVNEGSLMELQGHIGRFQRQCLGLLSRFGGSDRLRQFKFQDDNVEGDKVSKKDEIELAMQQICANVMEYCQSLMLQSSPTFQHAVCLFTPSLSETVNRDGPRQDTQAPVVPYWRLPGLGIIIYLLKQSANDFFSYYDSHRQSVSKLQNVEQLPPDEIKELCQSVMPAGVDKISTAQKYVLARRRLVKVINNRAKLLSLCSFIIETCLFILWRHLEYYLLHCMPTDSQDSLFASRTLFKSRRLQDSFASETNLDFRSGLAIVSQHDLDQLQADAINAFGESLQKKLLDIEGLYSKVRSRYSFIQALVRRIRGLLRISRN

SEQ ID NO: 420 - protein, 82 aa, Homo sapiens
HLRRSGNRNRLNYPARHHPSPHRPPIPTHPLHNRRGQRSLPYHQINWATNGTELRVHRLRGTNLQLLHTSPIIPRTRGLRLL

SEQ ID NO: 421 - protein, 302 aa, Homo sapiens
RKSSHVRSAQFGGQFFSLCLLQLGDASHRLRTQDVASPVAADLVVPVVVIGPDGFHQLCQSPLVFRVDLRESHRGAGLPVDQTPQPGLPLDDAVGNPHLATQGGQEHHQLDGVHVVRDDDQLRLLVLHQRGDRVHPGSQHRGPLGRDVPLAGRFLLRPGQQPLLLLLLRLGPVLVRQLQQLRGRLAVQRLRELVDGGRHLQPLVEDRALPLQPDVARPLDEARQVPLGLDVLTDAEVLGPLLEQRVDHLLGLLLLHDGGGRGHLLPLRLLPLRHLVFLRERTRGSTREFRTGTCRRTFYSVT

SEQ ID NO: 422 - protein, 70 aa, Homo sapiens
LQTVNNPEITLYGVGSVEAEVGLRGAQTSAEHIKPDVVIVLDTAVAGNVPGIDNIKYPLKLGQGPGLMLF

SEQ ID NO: 423 - protein, 57 aa, Homo sapiens
  SITE (36): Xaa equals any of the naturally occurring L-amino acids
SESIIYTLTFHYIYILLQKKLFMFPNCELTHRVKLXLTLIHRPHLLRTCTLPLYVHV

SEQ ID NO: 424 - protein, 253 aa, Homo sapiens
  SITE (12): Xaa equals any of the naturally occurring L-amino acids
  SITE (68): Xaa equals any of the naturally occurring L-amino acids
AHRGLWFPAPGXEPGSPGSGWLVSPRGRGALFLPGTPVRVWVQKTMDRLKPCGVLMQAEASSHVHHVXWVLRTPMAQGNLLEQGVGRQPLQVLQVRVEEGAVQQAGAQEPLHDVANCAVIRQPHLLSCAHEAAQAGPWAHLEGKASAEAEPGPTSSKPELDRGHSSATLDPLGGLNGVVQAGPPQVDVLAGLEAGEQVQEAPCVHIIVIIHVAKPLAPGLNELVILHGHLAAEGLTSAHRRAVGVDDTVAALE

SEQ ID NO: 425 - protein, 124 aa, Homo sapiens
  SITE (122): Xaa equals any of the naturally occurring L-amino acids
SLARGPEQQACSCPYIRTPEWCDRRAKEPPTRGKADVNLRATHLWKATSLSFSLVQKGNPLICEHIIHLNPSCWLCGLGLGKAVLLLPGLGPRQYGQLLQGNGPSRGGRHSTGEDGSRGAAXEA

SEQ ID NO: 426 - protein, 394 aa, Homo sapiens
  SITE (24): Xaa equals any of the naturally occurring L-amino acids
DPRRPASGGPGLLRRPPLLATGAXAMQPPPPGPLGDCLRDWEDLQQDFQNIQETHRLYRLKLEELTKLQNNCTSSITRQKKRLQELALALKKCKPSLPAEAEGAAQELENQMKERQGLFFDMEAYLPKKNGLYLSLVLGNVNVTLLSKQAKFAYKDEYEKFKLYLTIILILISFTCRFLLNSRVTDAAFNFLLVWYYCTLTIRESILINNGSRIKGWWVFHHYVSTFLSGVMLTWPDGLMYQKFRNQFLSFSMYQSFVQFLQYYYQSGCLYRLRALGERHTMDLTVEGFQSWMWRGLTFLLPFLFFGHFWQLFNALTLFNLAQDPQCKEWQGCAPQVSQSAAREQEGLRLGLPLPAQRGFCPVCCGRGWEAPLECACIRGSLLFSLGFYGRCGP

SEQ ID NO: 427 - protein, 255 aa, Homo sapiens
LGTQSGNTRMDQLVCRIAHQEDQKPVALLICPQDSGGAPALPPPTCQFPDPPIRDHLDQLPQVLHLPSLQAEHQGHASPASRLLHAPVTGVGRAGSQWSCGPVPLLDAAALTHEVRGALQGYLQVRGFTSGHKPPEAFCHLPERQPGRLRTQPRGEIPVGPEPQDLRTTQPYHRTVQDCPCHLCCLSQTLVFSKAPVSTSCMPLCKATHHCSCRSLWTWGWMGLKMLHVNIGLVRFLAFYLVTGCFLFWGGGIGL

SEQ ID NO: 428 - protein, 107 aa, Homo sapiens
  SITE (15): Xaa equals any of the naturally occurring L-amino acids
  SITE (104): Xaa equals any of the naturally occurring L-amino acids
APLLGHRGLGVSQGXCVSPPLTRRRGVARVGLSGAATGLITQQRAGRARPGASRGGAETRIRARPLPRAQADSAAAPSPLPGRTSVLRKGAGQQPGQGSASVSXQFI

SEQ ID NO: 429 - protein, 119 aa, Homo sapiens
FSCLSLLSSWDYNRVPPHPANFVFLVEMGFPHVGQAGPELLTSGDPPSSASQSAGIAGVSHRAQRLNVSFSLNYIMKNISTTQEAETTGARRHTWLIFVFLVETGFHRVSQDGLDLLTL

SEQ ID NO: 430 - protein, 186 aa, Homo sapiens
RPTRPAPSGGVVVAPSSSGRIVWSPAVPGIPVRSSSLPLFSDAMPAPTQLFFPLIRNCELSRIYGTACYCHHKHLCCSSSYIPQSRLRYTPHPAYATFCRPKENWWQYTQGRRYASTPQKFYLTPPQVNSILKANEYSFKVPEFDGKNVSSILGFDSNQLPANAPIEDRRSAATCLQTRGMLLGVF

SEQ ID NO: 431 - protein, 119 aa, Homo sapiens
  SITE (6): Xaa equals any of the naturally occurring L-amino acids
  SITE (7): Xaa equals any of the naturally occurring L-amino acids
  SITE (23): Xaa equals any of the naturally occurring L-amino acids
  SITE (25): Xaa equals any of the naturally occurring L-amino acids
  SITE (96): Xaa equals any of the naturally occurring L-amino acids
NLKPRXXFHVRVSSVPSSPKSLXRXLASTLWSLLDLWATAYRSCQENGQGLVYLKQLDHLSSYSHCNREKLEGILSLRVKSIQSTIEAIATRQTTXQLIARYKYQPVLFHEESSNSDVF

SEQ ID NO: 432 - protein, 210 aa, Homo sapiens
KADSPCSLSCWHRAECGNYCLNTIIEAIEIPQFIGRSYLTYDNPDILKRVSGSRSNVFMRFKTTAKDGLLLWRGDSPMRPNSDFISLGLRDGALVFSYNLGSGVASIMVNGSFNDGRWHRVKAVRDGQSGKITVDDYGARTGKSPGMMRQLNINGALYVGGMKEIALHTNRQYMRGLVGCISHFTLSTDYHISLVEDAVDGKNINTCGAK

SEQ ID NO: 433 - protein, 308 aa, Homo sapiens
AFAKSYLGDTIEGTPAGTGPEFPGRPTRPLEAVSPRRKHLGFSRKHKRRQCVHYRLQPPFEARFLRFLPLAWNPRGRIGMRIEVYGCAYKSEVVYFDGQSALLYTLDKKPLKPIRDVISLKFKAMQSNGILLHREGQHGNHITLELIKGKLVFFLNSGNAKLPSTIAPVTLTLGSLLDDQHWHSVLIELLHTQVNFTVDKHTHHFQAKGDSSNLDLNFEISFGGIPTPGRSRAFTRKSFHGCLENLYYNGVDVTELAKKHKPQILMMGNVSFSCPQPQTVPVTFLSSRSYLALPGNSGEDKVSVTFQF

SEQ ID NO: 434 - protein, 308 aa, Homo sapiens
AAASTAHMRLEFHNIETGIMTERRFISVVPSNFIGHLSGLVFNGQPYMDQCKDGDITYCELNARFGLRAIVADPVTFKSRSSYLALATLQAYASMHLFFQFKTTAPDGLLLFNSGNGNDFIVIELVKGYIHYVFDLGNGPSLMKGNSDKPVNDNQWHNVVVSRDPGNVHTLKIDSRTVTQHSNGARNLDLKGELYIGGLSKNMFSNLPKLVASRDGFQGCLASVDLNGRLPDLIADALHRIGQVERGCDGPSTTCTEESCANQGVCLQQWDGFTCDCTMTSYGGPVCNDRECLGGLGAVWGDQGPSQP

SEQ ID NO: 435 - protein, 103 aa, Homo sapiens
GTGWLAVGSDREYPIQTPREACYGDMDGFPGVRNYGVVDPDDLYDVYCYAEDLNGELFLGDPPEKLTLEEARAYCQERGAEIATTGQLYAAWDGGLDHCSPGG

SEQ ID NO: 436 - protein, 223 aa, Homo sapiens
  SITE (59): Xaa equals any of the naturally occurring L-amino acids
  SITE (170): Xaa equals any of the naturally occurring L-amino acids
  SITE (182): Xaa equals any of the naturally occurring L-amino acids
TGLTCWGSCRLAHTLAISPGTPTSCTCAASLGSQQLLGLPRDPGSSVSGTFGCLGGRLXIPGTGVSLLVPNGAIPQGKFYEMYLLINKAESTLPLSEGTQTVLSPSVTCGPTGLLLCRPVILTMPHCAEVSARDWIFQLKTQAHQGHWEEVVTLDEETLNTPCYCQLEPXACHILLDQWAPXCSRASPIPAQQSSGSSWPSSPPPSAPPWSTASGSTAWRTRL

SEQ ID NO: 437 - protein, 81 aa, Homo sapiens
  SITE (6): Xaa equals any of the naturally occurring L-amino acids
  SITE (8): Xaa equals any of the naturally occurring L-amino acids
  SITE (39): Xaa equals any of the naturally occurring L-amino acids
GIWVLXYXHTHTHTYIYILPSMKSRYRIFSSSLKVPFCXSPPTLPQATRDVLSICKLVYPTLEFNASCTLLYLAYFYAACF

SEQ ID NO: 438 - protein, 244 aa, Homo sapiens
  SITE (126): Xaa equals any of the naturally occurring L-amino acids
  SITE (148): Xaa equals any of the naturally occurring L-amino acids
REFPGRPTRPLRMTVEKEAPDAHFTVDKQNISLWPREPPPKSGPSLVPGKTPTVRAALICLTLVLVASVLLQAVLYPRFMGTISDVKTNVQLLKGRVDNISTLDSEIKKNSDGMEAAGVQIQMVNXSLGYVRSQFLKLKTSVEKANAXIQILTRSWEEVSTLNAQIPELKSDLEKASALNTKIRALQGSLENMSKLLKRQNDILQVVSQGWKYFKGNFYYFSLIPKTWYSAEQFCVSRNSHLTS

SEQ ID NO: 439 - protein, 154 aa, Homo sapiens
  SITE (141): Xaa equals any of the naturally occurring L-amino acids
SADRWANVKVECEPSWQPFQGHCYRLQAEKRSWQESKKACLRGGGDLVSIHSMAELEFITKQIKQEVEELWIGLNDLKLQMNFEWSDGSLVSFTHWHPFEPNNFRDSLEDCVTIWGPEGRWNDSPCNQSLPSICKKAGQLXQGAAEEDHGCRKG

SEQ ID NO: 440 - protein, 108 aa, Homo sapiens
  SITE (28): Xaa equals any of the naturally occurring L-amino acids
AQGARPKEDHGFPEGLDVATAPSCYWLXEDQVTYSEARRMCTDHGSQLVTITNRFEQAFVSSLIYNWEGEYFWTALQDLNSTGSFFWLSGDEVMYTHWNRDQPGEPLL

SEQ ID NO: 441 - protein, 92 aa, Homo sapiens
  SITE (33): Xaa equals any of the naturally occurring L-amino acids
  SITE (34): Xaa equals any of the naturally occurring L-amino acids
NFVAKAHGSPRVYWLGLNDRAQEGDWRWLDGSXXTLSFWEPEEPNNIHDEDCATMNKGGTWNDLSCYKTTYWICEAEMFLLKPRAEAGGSIS

SEQ ID NO: 442 - protein, 87 aa, Homo sapiens
FLLNGFSYPNSIHSDTIGLGFTGPLGDVILSPSVGEHNGCSGHPCGKGPGPFSLGKTSLKHVFQGQPSHRALSHVFHVGHGFFHVFG

SEQ ID NO: 443 - protein, 52 aa, Homo sapiens
NTGHRKCCFFVLDFTLIYVYGCMHKIIGHMYLWNKLDFLYNIKIHHFRKKKK

SEQ ID NO: 444 - protein, 148 aa, Homo sapiens; identical to SEQ ID NO: 284

SEQ ID NO: 445 - protein, 89 aa, Homo sapiens
  SITE (13): Xaa equals any of the naturally occurring L-amino acids
  SITE (76): Xaa equals any of the naturally occurring L-amino acids
GSADGTTDEDNGXCRCARTKMFPCALFLFCYIDLENEGTTSGLGFFCLFVSSFHIELLQECSYAITSLFTYFLCIXLLAHFKGLHGNLP

SEQ ID NO: 446 - protein, 92 aa, Homo sapiens
  SITE (3): Xaa equals any of the naturally occurring L-amino acids
  SITE (4): Xaa equals any of the naturally occurring L-amino acids
ARXXYVFQVQAMNSAGLGQPSMPTDPVLLEDKPGAHEIEVGVDEEGFIYLAFEAPEAPDSSEFQWSKDYKGPLDPQRVKIEDKVNKSKVILK

SEQ ID NO: 447 - protein, 173 aa, Homo sapiens
  SITE (154): Xaa equals any of the naturally occurring L-amino acids
MPQPGPPYDVRASEVRATSLVLQWEPPLYMGAGPVTGYHVSFQEEGSEQWKPVTPGPISGTHLRVSDLQPGKSYVFQVQAMNSAGLGQPSMPTDPVLLEDKPGAHEIEVGVDEEGFIYLAFEAPEAPDSSEFQWSKDYKGPLDPQRVKIEDKVXKSKVILKEPASRIWAPTQS

SEQ ID NO: 448 - protein, 211 aa, Homo sapiens
KVRLQVPVRNSRVDPRVREYSIVLEARDGGGMIAQCTVEVEVIDENDNAPEVIFQSLPNLIMEDAELGTHIALLKVRDKDSRHNGEVTCKLEGDVPFKILTSSRNTYKLVTDAVLDREQNPEYNITVTATDRGKPPLSSSSSITLHIGDVNDNAPVFSQSSYIVHVAENNPLEPLFHKSGLLIRTWGPTAKSLTASWPVTWSSGSCHPTCP

SEQ ID NO: 449 - protein, 223 aa, Homo sapiens
  SITE (223): Xaa equals any of the naturally occurring L-amino acids
WIPRAAGIRHELRAKAIDRKTGRQVEPESEFIIKIHDINDNEPKFTKDLYTASVPEMSGVGTSVIQVTATDADDANYGNSAKVVYSILQGQPYFSVDPESGIIKTALPDMSRENREQYQVVIQAKDMGGQMGGLSGTTTVNITLTDVNNNPPRFPQSTYQFNSPESVPLGTHLGRIKANDPDVGENAEMEYSIAEGDGADMFDVITDKDTQEGIITVKQNLDX

SEQ ID NO: 450 - protein, 380 aa, Homo sapiens
  SITE (11): Xaa equals any of the naturally occurring L-amino acids
  SITE (86): Xaa equals any of the naturally occurring L-amino acids
  SITE (254): Xaa equals any of the naturally occurring L-amino acids
  SITE (272): Xaa equals any of the naturally occurring L-amino acids
  SITE (307): Xaa equals any of the naturally occurring L-amino acids
  SITE (355): Xaa equals any of the naturally occurring L-amino acids
  SITE (359): Xaa equals any of the naturally occurring L-amino acids
  SITE (362): Xaa equals any of the naturally occurring L-amino acids
  SITE (372): Xaa equals any of the naturally occurring L-amino acids
FTFDVKATDGXQPLVSSTAKVTINVMDVNDTSPVVISPPSNTSFKLVPLSAIPGSVVAEVFAVDVDTGMNAELKYTIVSGNNKGLXRIDPVTGNITLEEKPAPTDVGLHRLVVNISDLGYPKSLHTLVLVFLYVNDTAGNASYIYDLIRRTMETPLDRNIGDSSQPYQNEDYLTIMIAIIAGAMVVIVVIFVTVLVRCRHASRFKAAQRSKQGAEWMSPNQENKQNKKKKRKKRKSPKSSLLNFVTIEESKPDXAVHEPINGTISLPAELEXQSIGRFDWGPAPPTTFKPNSPDLAKHYKSASPQPXFHLKPDTPVSVKKHHVIQELPLDNTFVGGCDTLSKRSSTSSVIQCLRXQFPXRLXDKGPLTHQTXKTSHFYWS

SEQ ID NO: 451 - protein, 223 aa, Homo sapiens
  SITE (214): Xaa equals any of the naturally occurring L-amino acids
  SITE (216): Xaa equals any of the naturally occurring L-amino acids
GALSGTTSVLIKLSDVNDNKPIFKESLYRLTVSESAPTGTSIGTIMAYDNDIGENAEMDYSIEEDDSQTFDIITNHETQEGIVILKKKVDFEHQNHYGIRAKVKNHHVPEQLMKYHTEASTTFIKIQVEDVDEPPLFLLPYYVFEVFEETPQGSFVGVVSATDPDNRKSPIRYSITRSKVFNINDNGTITTSNSLDREISAWYNLSITATEKYXIXQISSIPL

SEQ ID NO: 452 - protein, 92 aa, Homo sapiens
  SITE (8): Xaa equals any of the naturally occurring L-amino acids
  SITE (10): Xaa equals any of the naturally occurring L-amino acids
  SITE (14): Xaa equals any of the naturally occurring L-amino acids
  SITE (15): Xaa equals any of the naturally occurring L-amino acids
  SITE (21): Xaa equals any of the naturally occurring L-amino acids
YQAVFASXPXQCHXXENSFWXKLEEANTDPCAPPFDSLQTYAFEGTGSLAGSLSSLESAVSDQDESYDYLNELGPRFKRLACMFGSAVQSNN

SEQ ID NO: 453 - protein, 152 aa, Homo sapiens
  SITE (5): Xaa equals any of the naturally occurring L-amino acids
KVRLXVPVRNSRVDPRVRSAAPGQLIQVIRALDRDEVGNSSHVSFQGPLGPDANFTVQDNRDGSASLLLPSRPAPPRHAPYLVPIELWDWGQPALSSTATVTVSVCRCQPDGSVASCWPEAHLSAAGLSTGALLAIITCVGALLGESGHSGT

SEQ ID NO: 454 - protein, 96 aa, Homo sapiens
SSYLLQAMWQRILHLGTSVHKFSVKLSASLSPVIPGFPQIVNSNPLTEAFRVNWLSGTYFEVVTTGMEQLDFETGPNIFDLQIYVKDEVGVTDLQS

SEQ ID NO: 455 - protein, 101 aa, Homo sapiens
  SITE (98): Xaa equals any of the naturally occurring L-amino acids
  SITE (99): Xaa equals any of the naturally occurring L-amino acids
  SITE (100): Xaa equals any of the naturally occurring L-amino acids
CASEPNSWLPLHPPPPPKSASPISFPFWLAVTPSFLLLGPSLESSLTPLSFTLDMKSFRKSCQLLNIPRTWPHPSVCITTTMVQATHPISPGLLQWLXXXL

SEQ ID NO: 456 - protein, 197 aa, Homo sapiens
  SITE (183): Xaa equals any of the naturally occurring L-amino acids
NRLTIGKAGTPAGTGPEFPGRPTRPNLTVIAAEINNPKETTRVAVFVRILDVNDNAPQFAVFYDTFVCENARPGQLIQTISAVDKDDPLGGQKFFFSLAAVNPNFTVQDNEDNTARILTRKNGFNRHEISTYLLPVVISDNDYPIQSSTGTLTIRVCACDSQGNMQSCSAEALLLPAGLSTGXLDRHPPLASSFYWL

SEQ ID NO: 457 - protein, 288 aa, Homo sapiens
LYATDADSEERGQVSYFLGPDAPSYFSLDSVTGILTVSTQLDREEKEKYRYTVRAVDCGKPPRESVATVALTVLDKNDNSPRFINKDFSFFVPENFPGYGEIGVISVTDADAGRNGWVALSVVNQSDIFVIDTGKGMLRAKVSLDREQQSSYTLWVEAVDGGEPALSSTAKITILLLDINDNPPLVLFPQSNMSYLLVLPSTLPGSPVTEVYAVDKDTGMNAVIAYSIIGRRGPRPESFRIDPKTGNITLEEALLQTDYGLHRLLVKVSDHGYPEPLHSTVMVNLFVQ

SEQ ID NO: 458 - protein, 339 aa, Homo sapiens
  SITE (228): Xaa equals any of the naturally occurring L-amino acids
  SITE (242): Xaa equals any of the naturally occurring L-amino acids
  SITE (244): Xaa equals any of the naturally occurring L-amino acids
  SITE (251): Xaa equals any of the naturally occurring L-amino acids
  SITE (257): Xaa equals any of the naturally occurring L-amino acids
HYRRYACRYRSGIPGSTHASAAIDFEKSKVLTFKLLAVEVNTPEKFSSTADVVIQLLDTNDNVPKFDSLYYVARIPENAPGGSSVVAVTAVDPDTGPWGEVKYSTYGTGADLFLIHPSTGLIYTQPWASLDAEATARYNFYVKAEDMEGKYSVAEVFITLLDVNDHPPQFGKSVQKKTMVLGTPVKIEAIDEDAEEPNNLVDYSITHAEPANVFDINSHTGEIWLKNXIRSLDALHNITPGXDXLWSLEVXAKDRGXPSFSTTALLKIDITDAEVSTKPWSGKRGQQASSDLSATWAEREGPSPGFLQKTLNVIKGSLCHQTHSLWKRVEFLVQYLLMV

SEQ ID NO: 459 - protein, 306 aa, Homo sapiens
  SITE (5): Xaa equals any of the naturally occurring L-amino acids
EVRTXRALGDRDAARQRLLVAVRDGGQPPLSATATLHLVFADNLQEILPDLSDRPVLSDPQAELQFYLVVALALISVLFLLAVILAIALRLRRSLSPATWDCFHPGLCVKSGPVVPPNYSEGTLPYSYNLCIAHTGTKEFNFLKCSVPLHSNEDMVCSVSPGALIPPHGGEDLTSHPETLTSQAPPNTDWRFSQAQRPGTSGSQNGDDTGTWPNNQFDTEMLQAMILASASEAADGSSTLGGGAGTMGLSARYGPQFTLQHVPDYRQNVYIPGSNATLTNAAGKRDGKAPAGGNGNKKKSGKKEKK

SEQ ID NO: 460 - protein, 166 aa, Homo sapiens
  SITE (23): Xaa equals any of the naturally occurring L-amino acids
FKVPLPVPVRNSRVDPRVRPFDXFSVDPNNGTLFTIVGTVALGHDGSGAVDVVLEARDHGAPGRAARATVHVQLQDQNDHAPSFTLSHYRVAVTEDLPPGSTLLTLEATDADGSRSHAAVDYSIISGNWGRVFQLEPRLAEAGESAGPGPRALGCLVLLEPLDLKA

SEQ ID NO: 461 - protein, 104 aa, Homo sapiens
  SITE (88): Xaa equals any of the naturally occurring L-amino acids
  SITE (97): Xaa equals any of the naturally occurring L-amino acids
ARSPRLTWTPLPAQSDTPSSPTQIRSVASLSSPRKAPSIQQHPWIARLAPGTTSLCWLQSSTVLHRPRACKWPSRPWIRMTMLPSWLXPTILLGGNXESSGQLD

SEQ ID NO: 462 - protein, 155 aa, Homo sapiens
  SITE (114): Xaa equals any of the naturally occurring L-amino acids
SSHIVSLRLPCPYTCSVSVSCPHLPSFSLGPCDWLFVFFCCPSQNQEKLPATAAHPPAGDVVPQTCLHGSIHYSWPQPHPGSTGLQLREGTSLPPRARAPASRVAASLELCPAXSFPWASQPWALSCVLPEGVGKGKGEAAGEGERGRKGRGLHL

SEQ ID NO: 463 - protein, 137 aa, Homo sapiens
  SITE (133): Xaa equals any of the naturally occurring L-amino acids
  SITE (136): Xaa equals any of the naturally occurring L-amino acids
RHPFSWASSVSTIAMQQQEKLIQQERALLNFTEWKRSCALQMKYCQAFMQNSLSSAHNSSPCPNNWIQNRESCYYVSEIWSIWHTSQENCLKEGSTLLQIESKEEMDFITGSLRKIKGSYDYWVGLSQEDTAXAVXK

SEQ ID NO: 464 - protein, 243 aa, Homo sapiens
ADAWADAWAEITYAEVRFKNEFKSSGINTASSAASKERTAPLKSNTGFPKLLCASLLIFFLLLAISFFIAFVIFFQKYSQLLEKKTTKELVHTTLECVKKNMPVEETAWSCCPKNWKSFSSNCYFISTESASWQDSEKDCARMEAHLLVINTQEEQDFIFQNLQEESAYFVGLSDPEGQRHWQWVDQTPYNESSTFWHPREPSDPNERCVVLNFRKSPKRWGWNDVNCLGPQRSVCEMMKIHL

SEQ ID NO: 465 - protein, 67 aa, Homo sapiens
  SITE (46): Xaa equals any of the naturally occurring L-amino acids
  SITE (62): Xaa equals any of the naturally occurring L-amino acids
KSELVCYEPHGTNLLFPGVLSSPCPPNWIIYEKSCYLFSMSLNSWXGSKRQCWQLGSNLLKXDSSNE

SEQ ID NO: 466 - protein, 94 aa, Homo sapiens
  SITE (52): Xaa equals any of the naturally occurring L-amino acids
  SITE (68): Xaa equals any of the naturally occurring L-amino acids
KNPKSASPDGPASWKFNGGSLYYFSSVKKSWHEAEQFCVSQGAHLASVASKXEQAFLVEFTSKVYYWXGLTDRGTEGSWRWTDGTPFNAAQNKA

SEQ ID NO: 467 - protein, 106 aa, Homo sapiens
  SITE (56): Xaa equals any of the naturally occurring L-amino acids
  SITE (59): Xaa equals any of the naturally occurring L-amino acids
  SITE (99): Xaa equals any of the naturally occurring L-amino acids
  SITE (101): Xaa equals any of the naturally occurring L-amino acids
LGAQLLSLASYEEEHFVANMLNKIFGESEPEIHEQHWFWIGLNRRDPRGVQSWRWXDGXGFSYHNFDRSRHDDDDIRGCAVLDLASLHGWAMHATHSWXGXANPQS

SEQ ID NO: 468 - protein, 210 aa, Homo sapiens
  SITE (149): Xaa equals any of the naturally occurring L-amino acids
  SITE (177): Xaa equals any of the naturally occurring L-amino acids
  SITE (190): Xaa equals any of the naturally occurring L-amino acids
TRGVTCSSLLCGLLSYQSTLDMHEEEIYTSLQWDSPAPDTYQKCLSSNKCSGACCLVMVISCVFCMGLLTASIFLGVKLLQVSTIAMQQQEKLIQQERALLNFTEWKRSCALQMKYCQAFMQNSLSSAHNSSPCPNNWIQNRESCYYVXEIWSIWHTSQENCLKEGSTLLQIESKEXMVNTVLWSHVILXISFYLLKEIPHSHKKKFLNI

SEQ ID NO: 469 - protein, 157 aa, Homo sapiens
  SITE (5): Xaa equals any of the naturally occurring L-amino acids
  SITE (6): Xaa equals any of the naturally occurring L-amino acids
  SITE (75): Xaa equals any of the naturally occurring L-amino acids
  SITE (76): Xaa equals any of the naturally occurring L-amino acids
ERWAXXMDRWFHYKLHLLGTRQTSACRQGQEVRVHDSQPRGLGGPEVPDSLALHLQAQQRHQRNAAPRPANYSPXXLPSDWIQFLNKCFQVQGQEPQSRVKWSEAQFSCEQQEAQLVTITNPLEQAFITASLPNVTFDLWIGLHASQRDFQWVEQEL

SEQ ID NO: 470 - protein, 198 aa, Homo sapiens
LHWYKILLGISGTVNGILTLTLISLILLVSQGVLLKCQKGSCSNATQYEDTGDLKVNNGTRRNISNKDLCASRSADQTVLCQSEWLKYQGKCYWFSNEMKSWSDSYVYCLERKSHLLIIHDQLEMAFIQKNLRQLNYVWIGLNFTSLKMTWTWVDGSPIDSKIFFIKGPAKENSCAAIKESKIFSETCSSVFKWICQY

SEQ ID NO: 471 - protein, 143 aa, Homo sapiens
  SITE (76): Xaa equals any of the naturally occurring L-amino acids
  SITE (77): Xaa equals any of the naturally occurring L-amino acids
  SITE (79): Xaa equals any of the naturally occurring L-amino acids
  SITE (124): Xaa equals any of the naturally occurring L-amino acids
  SITE (130): Xaa equals any of the naturally occurring L-amino acids
  SITE (138): Xaa equals any of the naturally occurring L-amino acids
NLTGNIWNREWYSHFDFDLLDPVGFSGSIAKMPKRKLLKVNNGTRRNISNKDLCASRSADQTVLCQSEWLKYQGKXXWXSNEMKSWSDSYVYCLERKSHLLIIHDQLEMAFIQKNLRQLNYVWXGLNFTXLKMTWTWXDGSSI

SEQ ID NO: 472 - protein, 103 aa, Homo sapiens
  SITE (96): Xaa equals any of the naturally occurring L-amino acids
LCPHFPGCQTYMDIVIVLDGSNSIYPWVEVQHFLINILKKFYIGPGQIQVGVVQYGEDVVHEFHLNDYRSVKDVVEAASHIEQRGGTETRTAFGIXFARLKKK

SEQ ID NO: 473 - protein, 76 aa, Homo sapiens
LSPGQIQGEGNLVLPLMDEQRGHFAEEHLEWGILLQPTLKNSFCHRHSIRSRFCEDGVFLWSVSHQWSGKNAVKSD

SEQ ID NO: 474 - protein, 300 aa, Homo sapiens
  SITE (170): Xaa equals any of the naturally occurring L-amino acids
  SITE (247): Xaa equals any of the naturally occurring L-amino acids
RSADGLCGNKDRERGNEFTRNQQAAQEVVNPKKKMKKKKYVNSGTVTLLSFAVESECTFLDYIKGGTQINFTVAIDFTASNGNPSQSTSLHYMSPYQLNAYALALTAVGEIIQHYDSDKMFPALGFGAKLPPDGRVSHEFPLNGNQENPSCCGIDGILEAYHRSLRTVQXYGPTNFAPVVTHVARNAAAVQDGSQYSVLLIITDGVISDMAQTKEAIVNAAKLPMSIIIVGVGQAEFDAMVELDGDXVRISSRGKLAERDIVQFVPFRDYVDRTGNHVLSMARLARDVLAEIPDHQGGGV

SEQ ID NO: 475 - protein, 116 aa, Homo sapiens
  SITE (114): Xaa equals any of the naturally occurring L-amino acids
KCPEAECFRLRCELGPLHQQESQSLQLHFRVWAKTFLQREHQPFSLQCEAVYKALKMPYRILPRQLPQKERQVATAVQWTKAEGSYGVPLWIIILAILFGLLLLGLIIYILYKXGL

SEQ ID NO: 476 - protein, 291 aa, Homo sapiens
  SITE (18): Xaa equals any of the naturally occurring L-amino acids
  SITE (131): Xaa equals any of the naturally occurring L-amino acids
TKKSHKATVHVRVNDVNXFAPVFVERLYRAAVTEGKLYDRILRVEAIDGDCSPQYSQICYYEILTPNTPFLIDNDGNIENTEKLQYSGERLYKFTVTAYDCGKKRAADDAEVEIQVKPTCKPSWQGWNKRXEYAPGAGSLALFPGIRLETCDEPLWNIQATIELQTSHVAKGCDRDNYSERALRKLCGAATGEVDLLPMPGPNANWTAGLSVHYSQDSSLIYWFNGTQAVQVPLGGPSGLGSGPQDSLSDHFTLSFWMKHGVTPNKGKKEEETIVCNTVQNGEPPLQALAR

SEQ ID NO: 477 - protein, 86 aa, Homo sapiens
LINSRFPIPSATDPDTGFNGVQHYELLNGQSVFGLDIVETPEGEKWPQLIVQQNLDREQKDTYVMKIKVEDGGTHRNPVRPYCRSQ

SEQ ID NO: 478 - protein, 100 aa, Homo sapiens
  SITE (83): Xaa equals any of the naturally occurring L-amino acids
  SITE (84): Xaa equals any of the naturally occurring L-amino acids
  SITE (92): Xaa equals any of the naturally occurring L-amino acids
  SITE (93): Xaa equals any of the naturally occurring L-amino acids
  SITE (95): Xaa equals any of the naturally occurring L-amino acids
AKIHKRSVSVTSITSTVLPPVYNQQNEDTCIIRISVEDNNGNMYKSIMLTSQDKTPAVIQRAMLKHNLDSDPAEEYELVQVIXXDKELVIPXXAXSFMAM

SEQ ID NO: 479 - protein, 111 aa, Homo sapiens
ELDREEVDFYSFGVEARDHGTPALTASASVSVTVLDVNDNNPTFTQPEYTVRLNEDAAVGTSVVTVSAVDRDAHSVITYQITSGNTRNRFSITSQSGGGLGIPCPATGLQT

SEQ ID NO: 480 - protein, 120 aa, Homo sapiens
  SITE (117): Xaa equals any of the naturally occurring L-amino acids
QFTESHLCSLMGDNPFQPKSNSKMAELFMECEEEELEPWQKKVKEVEDDDDDEPIFVGEISSSKPAISNILNRVNPSSYSRGLKNGALSRGITAAFKPTSQHYTNPTSNPVPASPIXFSS

SEQ ID NO: 481 - protein, 205 aa, Homo sapiens
  SITE (186): Xaa equals any of the naturally occurring L-amino acids
  SITE (192): Xaa equals any of the naturally occurring L-amino acids
  SITE (198): Xaa equals any of the naturally occurring L-amino acids
RPGTLLGTFNAMDPDSQIRYELVHDPANWVSVDKNSGVVITVEPIDRESPHVNNSFYVIIIHAVDDGFPPQTATGTLMLFLSDINDNVPTLRPRSRYMEVCESAVHEPLHIEAEDPDLEPFSDPFTFELDNTWGNAEDTWKLGRNWGQSVELLTLRSLPRGNYLVPLLHWRQTGTFPEANCPCKDXPLCHGXHMCGAXQMQNGGF

SEQ ID NO: 482 - protein, 427 aa, Homo sapiens
  SITE (278): Xaa equals any of the naturally occurring L-amino acids
WIPRAAGIRHERLVTNAALDREEVFLYNITVTATDKGTPPLSTETIISLNVADTNDNPPTFPHSSYSVYVLENNPRGASIFSVNALDPDVDQNAQVSYSLAEDTLQGAPLSSYVSINSDTGILYALRSFDYEQLRDLQLWVTASDSGDPPLSSNVSLSLFVLDQNDNAPEILYPALPTDGSTGVELAPRSAEPGYLVTKVVAVDRDSGQNAWLSYRLLKASEPGLFSVGLHTGEVRTARALLDRDALKQSLVVAVQDHGQPPLSATVTLTVAVADRIXDILADLGSLEPSAKPNDSDLTLYLVVAVAAVSCVFLAFVIVLLALRLQRWHKSRLLQASGGGLASMPGSHFVGVEGVRAFLQTYSHEVSLTADSRKSHLIFPQPNYADTLINQESYEKSEPLLITQDLLETKGEPRQLQVSFFPPKREE

SEQ ID NO: 483 - protein, 165 aa, Homo sapiens
  SITE (7): Xaa equals any of the naturally occurring L-amino acids
  SITE (9): Xaa equals any of the naturally occurring L-amino acids
  SITE (12): Xaa equals any of the naturally occurring L-amino acids
  SITE (59): Xaa equals any of the naturally occurring L-amino acids
  SITE (61): Xaa equals any of the naturally occurring L-amino acids
  SITE (155): Xaa equals any of the naturally occurring L-amino acids
QISENAXTXMRXPLPHAWDPDIGKNSLQSYELSPNTHFSLIVQNGADGSKYPELVLKRXLXREEKAAHHLVLTASDGGDPVRTGTARIRVMVLDANDNAPAFAQPEYRASVPENLALGTQLLVVNATDPDEGVNAEVRYSFRYVDDKAGQVFKLXCNSGTISTIG

SEQ ID NO: 484 - protein, 74 aa, Homo sapiens
PLLHTSRKCGAVVIILQGIDENERKLSHPFFDLLSPDENDLFRKTILFYTKPVSLQVFDWLAIFLLLILEESSN

SEQ ID NO: 485 - protein, 291 aa, Homo sapiens
  SITE (143): Xaa equals any of the naturally occurring L-amino acids
EKVPLEKEETSHIEELQSEETAISDFSTGENVGPLALPVGKARQLIGLYTMAHNPNMTHLKINLPVTALPPLWVRCDSSDPEGTCWLGAELITTNNSITGIVLYVVSCKADKNYSVNLENLKNLHKKRHHLSTVTSKGFAQYXLFKSSALDDTITASQTAIALDISWSPVDEILQIPPLSSTATLNIKVESGEPRGPLNHLYRELKFLLVLADGLRTGVTEWLEPLEAKSAVELVQEFLNDLNKLDGFGDSTKKDTEVETLKHDTAAVDRSVKRLFKVRSDLDFAEQLWCK

SEQ ID NO: 486 - protein, 140 aa, Homo sapiens; identical to SEQ ID NO: 340

SEQ ID NO: 487 - protein, 189 aa, Homo sapiens
ADNNFTQETAMTMITPSSKLTLTKGNKSWSSTAVAAALELVDPPGCRNSARDEGSTSWKAALEASKGCIKCEAPCPEDWLLYGRKCYFFSEEPRDWNTGRQYCHTHEAVLAVIQSQKELEFMFKFTRREPWIGLRRVGDEFHWVNGDPFDPDTFTIAGPGECVFVEPTRLVSTECLMTRPWVCSKMAYT

SEQ ID NO: 488 - protein, 222 aa, Homo sapiens
LRDSLLSTVISGAERKELPNAISIQGLSRTMEYHPDLENLDEDGYTQLHFDSQSNTRIAVVSEKGSCAASPPWRLIAVILGILCLVILVIAVVLGTMAIWRSNSGSNTLENGYFLSRNKENHSQPTQSSLEDSVTPTKAVKTTGVLSSPCPPNWIIYEKSCYLFSMSLNSWDGSKRQCWQLGSNLLKIDSSNELSLTLLPKLECSEAATSQAQVILPPQLPE

SEQ ID NO: 489 - protein, 199 aa, Homo sapiens
HERGPCHTYKVQRLNESTSYKFCIQACNEAGEGPLSQEYIFTTPKSVPAALKAPKIEKVNDHICEITWECLQPMKGDPVIYSLQVMLGKDSEFKQIYKGPDSSFRYSSLQLNCEYRFRVCAIRQCQDSLGHQDLVGPYSTTVLFISQRTEPPASTNRDTVESTRTRRALSDEQCAAVILVLFAFFSILIAFIIQYFVIK

SEQ ID NO: 490 - protein, 166 aa, Homo sapiens
  SITE (132): Xaa equals any of the naturally occurring L-amino acids
AECLPRTPTWGRMALSLMSCWMLSLKGHQPLACWQWNHPVGPSLPKLPLDFEQLRGFHFQVEGRDGGIPPRSATVTINLFVVDRNDNYPVILFPLPRNGSVPVEIVPRSARTGHLVTKVVAEDADSGSNAWXSYHISRASDSSLFRISANIGELRTARLVLPTSDL

SEQ ID NO: 491 - protein, 126 aa, Homo sapiens
IHPEVELAVAGKEAKVPRDIAAAGSLKSAERLPTVRPAPSPPALSTRAVPLQAAETHKHKTATPQPTILPLGVHVPPTRYTNGDPGTCSGLLESTSRGEEHAPAGRHCCGLDTQRPPTLRLPNAGI

SEQ ID NO: 492 - protein, 78 aa, Homo sapiens
  SITE (15): Xaa equals any of the naturally occurring L-amino acids
  SITE (17): Xaa equals any of the naturally occurring L-amino acids
  SITE (70): Xaa equals any of the naturally occurring L-amino acids
SVRGGGRRERQCACXRXPEYTVFVKENNPPGCHIFTVSAWDADAQKNALVSYSLVERRVGEHALSSYVSXHAESGKVY

SEQ ID NO: 493 - protein, 276 aa, Homo sapiens
  SITE (64): Xaa equals any of the naturally occurring L-amino acids
FGTMDNTVLLDPPLIALDKDAPLRFAGEICGFKIHGQNVPFDAVVVDKSTGEGVIRSKEKLDCXLQKDYSFTIQAYDCGKGPDGTNVKKSHKATVHIQVNDVNEYAPVFKEKSYKATVIEGKQYDSILRVEAVDADCSPQFSQICSYEIITPDVPFTVDKDGYIKNTEKLNYGKEHQYKLTVTAYDCGKKRATEDVLVKISIKPTCTPGWQGWNNRIEYEPGTGALAVFPNIHLETCDEPVASVQATVELETSHIGKGCDRDTYSEKSLHRLCAAA

SEQ ID NO: 494 - protein, 185 aa, Homo sapiens
  SITE (39): Xaa equals any of the naturally occurring L-amino acids
  SITE (53): Xaa equals any of the naturally occurring L-amino acids
  SITE (57): Xaa equals any of the naturally occurring L-amino acids
  SITE (61): Xaa equals any of the naturally occurring L-amino acids
  SITE (69): Xaa equals any of the naturally occurring L-amino acids
  SITE (72): Xaa equals any of the naturally occurring L-amino acids
  SITE (116): Xaa equals any of the naturally occurring L-amino acids
  SITE (137): Xaa equals any of the naturally occurring L-amino acids
  SITE (142): Xaa equals any of the naturally occurring L-amino acids
PPAAALQWLALFTGPEQGRRCCGGDLLSLSYLPTAERLXVVVVKAKNLIWTNXKTTXDPFXKVYLLQDXRKXSKKKTAVKRDDPNPVFNEAMIFSVPAIVLQDLSLRVTVAESSSXGRGDNVGHVIIGPSASAWEPXIGTRXWPRCAGPCPCGTLSGETSNQGGPVGQWSCWSPVPTQLCLMPSP

SEQ ID NO: 495 - protein, 206 aa, Homo sapiens
  SITE (30): Xaa equals any of the naturally occurring L-amino acids
  SITE (33): Xaa equals any of the naturally occurring L-amino acids
  SITE (100): Xaa equals any of the naturally occurring L-amino acids
SSSRTPSGSADPTLLRPLSISPCSTDKPAXRRXHPLPTDLPSRGLLALSLKYVPAGSEGAGLPPSGELHFWVKEARDLLPLRAGSLDTYVQCFVLPDDSXASRQRTRVVRRSLSPVFNHTMVYDGFGPADLRQACAELSLWDHGALANRQLGGTRLSLGTGSSYGLQVPWMDSTPEEKQLWQALLEQPCEWVDGLLPLRTNLAPRT

SEQ ID NO: 496 - protein, 114 aa, Homo sapiens
  SITE (76): Xaa equals any of the naturally occurring L-amino acids
GPRCLASPEPGPRDGQAHSLYIRIVEGKNLPAKDITGSSDPYCIVKVDNEPIIRTATVWKTLCPFWGEEYQVHLPXTFHAVAFYVMDEDALSRDDVIGKVCLTRDTIASHPKGF

SEQ ID NO: 497 - protein, 208 aa, Homo sapiens
  SITE (40): Xaa equals any of the naturally occurring L-amino acids
  SITE (45): Xaa equals any of the naturally occurring L-amino acids
  SITE (46): Xaa equals any of the naturally occurring L-amino acids
  SITE (105): Xaa equals any of the naturally occurring L-amino acids
  SITE (177): Xaa equals any of the naturally occurring L-amino acids
  SITE (178): Xaa equals any of the naturally occurring L-amino acids
LWIGRHRGTLWPYQLRPGYLYGSDQLVVRILQALDLPAKXSNGFXXPYVKIYLLPDRKKKFQTKVHRKTLNPVFNETFQFSVPLAELAQRKLHFSVYDFNRFSRXDLIGQVVLDNLLELAEQPPDRPLWRDIVEGGSEKADLGELNFSLCYLPTAGRLTVTIIKASNLKAMDLTGFXXPYVKASLNQRGAASEEAENLHQEEHAEPHL

SEQ ID NO: 498 - protein, 195 aa, Homo sapiens
  SITE (147): Xaa equals any of the naturally occurring L-amino acids
  SITE (157): Xaa equals any of the naturally occurring L-amino acids
  SITE (164): Xaa equals any of the naturally occurring L-amino acids
  SITE (171): Xaa equals any of the naturally occurring L-amino acids
  SITE (176): Xaa equals any of the naturally occurring L-amino acids
  SITE (179): Xaa equals any of the naturally occurring L-amino acids
  SITE (180): Xaa equals any of the naturally occurring L-amino acids
RTPAPWASWRRAVKISHTSPDIPAEVQMSVKEHIMRHTRLQRQTTEPASSTRHTSFKRHLPRQMHVSSVDYGNELPPAAEQPTSIGRIKPELYKQKSVDGEDAKSEATKSCGKINFSLRYDYETETLIVRILKAFDLPAKDFCGKLXTLMFKILPPXLDRQMAXLQDPGCXARTLXPHXXMEEFPFPCGLLRELG

SEQ ID NO: 499 - protein, 102 aa, Homo sapiens
  SITE (93): Xaa equals any of the naturally occurring L-amino acids
  SITE (101): Xaa equals any of the naturally occurring L-amino acids
GTLVSESAQLEILSLKEVGDIKASTEMRLRRFQSVESGANNVVFIRTLGIEPEKLVHHILQDMYKTKKKKTRVILRMLPISGTCKLFRRYEKXCRNIFGTXV

SEQ ID NO: 500 - protein, 132 aa, Homo sapiens
  SITE (74): Xaa equals any of the naturally occurring L-amino acids
  SITE (77): Xaa equals any of the naturally occurring L-amino acids
RATRHACRLIFLSSSLPHSISPQLDPIPRSLGVFVKVSLMNHNKFVKCKKTSAVLGSINPVYNETFSFKADATXLDXASLSLTAVQNMEGDSKATPYPGLLGWGPRGAAECSGRVSASCPDLRRSCTSSLPG

SEQ ID NO: 501 - protein, 76 aa, Homo sapiens
  SITE (34): Xaa equals any of the naturally occurring L-amino acids
GDGRKWVWAVGRFLSTAGHLFFPAVTPSDCYVTXWLPTACSHRLQTRTVKNSSSPVWNQSFHFRIHRQLKVGQASA

SEQ ID NO: 502 - protein, 348 aa, Homo sapiens
  SITE (3): Xaa equals any of the naturally occurring L-amino acids
  SITE (7): Xaa equals any of the naturally occurring L-amino acids
  SITE (22): Xaa equals any of the naturally occurring L-amino acids
VTXGKVXLQVPVRNSRVDPRVXSSVSGSVMSVYSGDFGNLEVKGNIQFAIEYVESLKELHVFVAQCKDLAAADVKKQRSDPYVKAYLLPDKGKMGKKKTLVVKKTLNPVYNEILRYKIEKQILKTQKLNLSIWHRDTFKRNSFLGEVELDLETWDWDNKQNKQLRWYPLKRKTAPVALEAENRGEMKLALQYVPEPVPGKKLPTTGEVHIWVKECLDLPLLRGSHLNSFVKCTILPDTSRKSRQKTRAVGKTTNPIFNHTMVYDGFRPEDLMEACVELTVWDHYKLTNQFLGGLRIGFGTGKSYGTEVDWMDSTSEEVALWEKMVNSPNTWIEATLPLRMLLIAKISK

SEQ ID NO: 503 - protein, 334 aa, Homo sapiens
  SITE (184): Xaa equals any of the naturally occurring L-amino acids
AGMDILKQAFVRGLPTPTARFEQRTFSVIKIFPDLSSNDMLLFIVKGINLPTPPGLSPGDLDVFVRFDFPYPNVEEAQKDKTSVIKNTDSPEFKEQFKLCINRSHRGFRRAIQTKGIKFEVVHKGGLFKTDRVLGTAQLKLDALEIACEVREILEVLDGRRPTGGRLEVMVRIREPLTAQQLEXTTERWLVIDPVPAAVPTQVAGPKGKAPPVPAPARESGNRSARPLHSLSVLAFDQERLERKILALRQARRPVPPEVAQQYQDIMQRSQWQRAQLEQGGVGIRREYAAQLERQLQFYTEAARRLGNDGSRDAAKEALYRRNLVESELQRLRR

SEQ ID NO: 504 - protein, 399 aa, Homo sapiens
  SITE (22): Xaa equals any of the naturally occurring L-amino acids
  SITE (33): Xaa equals any of the naturally occurring L-amino acids
  SITE (369): Xaa equals any of the naturally occurring L-amino acids
ELLESQFSKTFIIDYYFEVVQXLKFGVYDIDNXTIELSDDDFLGECECTLGQIVSSKKLTRPLVMKTGRPAGKGSITISAEEIKDNRVVLFEMEARKLDNKDLFGKSDPYLEFHKQTSDGNWLMVHRTEVVKNNLNPVWRPFKISLNSLCYGDMDKTIKVECYDYDNDGSHDLIGTFQTTMTKLKEASRSSPVEFECINEKKRQKKKSYKNSGVISVKQCEITVECTFLDYIMGGCQLNFTVGVDFTGSNGDPRSPDSLHYISPNGVNEYLTALWSVGLVIQDYDADKMFPAFGFGAQIPPQWQVSHEFPMNFNPSNPYCNGIQGIVEAYRSCLPQIKLYGPTNFSPIINHVARFAAAATQQQTASQYXVLLIITDGVITDLDETRQAIVNASSCLCPS

SEQ ID NO: 505 - protein, 160 aa, Homo sapiens
  SITE (96): Xaa equals any of the naturally occurring L-amino acids
  SITE (104): Xaa equals any of the naturally occurring L-amino acids
  SITE (113): Xaa equals any of the naturally occurring L-amino acids
  SITE (157): Xaa equals any of the naturally occurring L-amino acids
  SITE (159): Xaa equals any of the naturally occurring L-amino acids
  SITE (160): Xaa equals any of the naturally occurring L-amino acids
KFIDTQTSQSRSSKDAVGQISVHVDITATPGTGDHKVTVKVIAINDLNWQTTAMFRPFVEVCILGPNLGDKKRKQGTKTKSNTWSPKYNETFQFIXGKENRPGXYELHLSVKXYCFAREDRIIGMTVIQLQNIAEKGSYGAWYSSEKYLYGLKLVWXIXX

SEQ ID NO: 506 - protein, 101 aa, Homo sapiens; identical to SEQ ID NO: 392

SEQ ID NO: 507 - protein, 163 aa, Homo sapiens
  SITE (154): Xaa equals any of the naturally occurring L-amino acids
  SITE (162): Xaa equals any of the naturally occurring L-amino acids
FAIKLQNLQTVRLVFKIQTQTPRKKTIGECSMSLRTLSTQEMDYSLDITPPSKISVCHAELELGTCFQAVNSRIQLQILEARYLPSSSTPLTLSFFVKVGMFSSGELIYKKKTRLLKASNGRVKWGETMIFPLIQSEKEIVFLIKLYSRSSVRXKTLCGARXG

SEQ ID NO: 508 - protein, 77 aa, Homo sapiens
  SITE (15): Xaa equals any of the naturally occurring L-amino acids
  SITE (49): Xaa equals any of the naturally occurring L-amino acids
  SITE (54): Xaa equals any of the naturally occurring L-amino acids
  SITE (71): Xaa equals any of the naturally occurring L-amino acids
CSGLTNKRLTKFKHXFQPGRRAGGRKNLSPPNPPQMSAPHSAQASPCLXSKMAXWESASPGAKPPENLGVXAKVNGV

SEQ ID NO: 509 - protein, 78 aa, Homo sapiens
VKSTFTSSLISECFWHFIIISQPHCAVRAVNPGLPGRKQTCPGWCVLVNSGARWKFQIWMYWEAPLAFALPGISSSER

SEQ ID NO: 510 - protein, 80 aa, Homo sapiens
SGYWAVRDRFLIISGLFKCPSIDGEGWHPPRSGSPQKFSAHPRVLYNQHPHITLSPLPQQPRAGVADRRATACGSKDFGG

SEQ ID NO: 511 - protein, 40 aa, Homo sapiens
RYCWVRTRRTAQVFPWDLVTWRLLATLTRGLPAKWVEDGR

SEQ ID NO: 512 - protein, 68 aa, Homo sapiens
  SITE (14): Xaa equals any of the naturally occurring L-amino acids
  SITE (42): Xaa equals any of the naturally occurring L-amino acids
KLQEQPRPGRRGSXGLRAGSEPRKHGLARSPGEQHSQASRRXLAGHPENVTAGEVTPSRATGPLTPHP

SEQ ID NO: 513 - protein, 118 aa, Homo sapiens
  SITE (112): Xaa equals any of the naturally occurring L-amino acids
IFSSKPGPRAANEASVEYLQEVARIRLCLDRLQISSRSLREARDGQGEAVLPAASQAVLYPGGERLAPGVPGAELSSQRGMEFVQGLSKPGRPHQWVFPKDVVKQQGLRQDXPGQMDK

SEQ ID NO: 514 - protein, 162 aa, Homo sapiens
  SITE (64): Xaa equals any of the naturally occurring L-amino acids
ILTYKETGPQTGNSLVQASARRKDTMTAPCWAQPGSLAKCLLEAVPARGLQQGDSLPSGHYQYXLYLEVGKRSPLRQQDNGQFREGEGSKRFRGHRSQRTPPRPTAGSAWKIHLLGTFWQPDGSNSPLGLIPSSKSWLQMSLSSPYWRAPPDSWAQFISSPF

SEQ ID NO: 515 - protein, 81 aa, Homo sapiens
  SITE (51): Xaa equals any of the naturally occurring L-amino acids
  SITE (67): Xaa equals any of the naturally occurring L-amino acids
  SITE (68): Xaa equals any of the naturally occurring L-amino acids
  SITE (69): Xaa equals any of the naturally occurring L-amino acids
  SITE (76): Xaa equals any of the naturally occurring L-amino acids
ETGPTTGKLLAKYFKFDSEKLAGILFWWLPKHTLRDQEPAEAGISQFQIKXSFISNMQLLGSPSPSXXXESVLQTXLREKQ

SEQ ID NO: 516 - protein, 183 aa, Homo sapiens
  SITE (113): Xaa equals any of the naturally occurring L-amino acids
VKDQGPMVSAPVKDQGPIVPAPVKGEGPIVPAPVKDEGPMVSAPIKDQDPMVPEHPKMKSAMATAPIKNQGSMVSEPVKNQGLVVSGPVKDQDVVVPEHAKVHDSPVVAPVKXQGPVVPESVKNQDPILPVLVKDQGPTVLQPPKNQGRIVPEPLKNQVPIVPVPLKDQDPLVAITSKGPRFC

SEQ ID NO: 517 - protein, 42 aa, Homo sapiens
  SITE (20): Xaa equals any of the naturally occurring L-amino acids
VAGPGCSRWYRFFFWLCFCXISTYWALIKGDLGDLSTFHEYR

SEQ ID NO: 518 - protein, 141 aa, Homo sapiens; identical to SEQ ID NO: 412
  SITE (57): Xaa equals any of the naturally occurring L-amino acids

SEQ ID NO: 519 - protein, 76 aa, Homo sapiens
  SITE (43): Xaa equals any of the naturally occurring L-amino acids
  SITE (49): Xaa equals any of the naturally occurring L-amino acids
  SITE (59): Xaa equals any of the naturally occurring L-amino acids
  SITE (61): Xaa equals any of the naturally occurring L-amino acids
  SITE (67): Xaa equals any of the naturally occurring L-amino acids
  SITE (69): Xaa equals any of the naturally occurring L-amino acids
  SITE (74): Xaa equals any of the naturally occurring L-amino acids
AQAMAMQPLPVHISKICCGCLLISPANLLLISSPIGERGTSTXFIDVKXMAAEPRFVGXGXATGMRXIXAADQXST

SEQ ID NO: 520 - protein, 173 aa, Homo sapiens
  SITE (141): Xaa equals any of the naturally occurring L-amino acids
KMSEEVRADTGGGRGEGGEGGEGGGGDGGTGRRGGRRGGRRGAGPEGSGSGTLSPLVGVSPGGPEGVRGRECFLRVTSAHLFEVELQAARTLERLELQSLEAAEIEPEPRPRGRPGPRAQICSLEPPSSVCASPTSALTGXCVAIWCWSLMPTQCPGAACRVDPSHQCGFGNS

SEQ ID NO: 521 - protein, 139 aa, Homo sapiens
  SITE (23): Xaa equals any of the naturally occurring L-amino acids
  SITE (71): Xaa equals any of the naturally occurring L-amino acids
  SITE (103): Xaa equals any of the naturally occurring L-amino acids
  SITE (116): Xaa equals any of the naturally occurring L-amino acids
  SITE (117): Xaa equals any of the naturally occurring L-amino acids
  SITE (123): Xaa equals any of the naturally occurring L-amino acids
QPQPWRRVRLPHRTLRPQRDSWXPGPHVLGGELKYTQCARGLGFCRRTREVVADESDKIWVGEEGSGGRRXPGGAAPAHAPLLSAPMGSRRLEGISVEEAMVXRTQLLEEELSSLXXELALCXADKEFVWSLWKRLQVT

SEQ ID NO: 522 - protein, 48 aa, Homo sapiens
  SITE (11): Xaa equals any of the naturally occurring L-amino acids
  SITE (16): Xaa equals any of the naturally occurring L-amino acids
KFSGPRYGERXPGGAXSPVRVFRVEYWRVPSEYGSIFENSKLYSTPTK

SEQ ID NO: 523 - protein, 189 aa, Homo sapiens
  SITE (2): Xaa equals any of the naturally occurring L-amino acids
  SITE (180): Xaa equals any of the naturally occurring L-amino acids
LXRVSAGSLQELALLTGIISKAALPGILSELDVDVNEGSLMELQGHIGRFQRQCLGLLSRFGGSDRLRQFKFQDDNVEGDKVSKKDEIELAMQQICANVMEYCQSLMLQSSPTFQHAVCLFTPSLSETVNRDGPRQDTQAPVVPYWRLPGLGIIIYLLKQSANDFFSYYDSHRQSVSKLXNVEQLPQMR

SEQ ID NO: 524 - protein, 133 aa, Homo sapiens
  SITE (30): Xaa equals any of the naturally occurring L-amino acids
STHASALSLRNTRCRREEGEGKKVAPAPAXVKKQEAKKVVNPLFEKRPKNFGIGQDIQPKRDLTRFVKWPRYIRLQRQRDPLQAAEGAARHQPVHAGAGPPDGHAAAEVAHKYRPETKQEKKQRLFARAEKKA

SEQ ID NO: 525 - protein, 68 aa, Homo sapiens
NRLENRNPSTRPNILLVTFGLRQLWTAFLEVSLKTKNRAGSGLPSGRFAGGIECKMGYKKTYKNNWNF

SEQ ID NO: 526 - protein, 74 aa, Homo sapiens
EALSWAALTNTPSSGDHGQVLVCYWWGRVLPQQRPCPQDEPMGQVSGGPAARAGRRRLRPESCLTGLPPAWGSS

SEQ ID NO: 527 - protein, 165 aa, Homo sapiens
  SITE (110): Xaa equals any of the naturally occurring L-amino acids
  SITE (120): Xaa equals any of the naturally occurring L-amino acids
  SITE (160): Xaa equals any of the naturally occurring L-amino acids
  SITE (164): Xaa equals any of the naturally occurring L-amino acids
PALQLLTQPGRLPGAASLDHPIEATERVQGGRTVSVGADAIGADAFLDTSPGGTAEGVESWLEKGIGLGAQADPPRWFACGVSGAGQEALTVLGREGVSGPGGEGLEATXQWPAEAPGSXCSKKLLLPGWDLLRGSLRKMPGESHEESGVRSPVLGSSDXHPIXR

SEQ ID NO: 528 - protein, 67 aa, Homo sapiens
  SITE (10): Xaa equals any of the naturally occurring L-amino acids
  SITE (11): Xaa equals any of the naturally occurring L-amino acids
  SITE (17): Xaa equals any of the naturally occurring L-amino acids
NGYENKSEIXXRKSALXDIKQYKNLKWCRYHRRHFPMPGKKKMQESGLVYTEQHFYSGATIINAYRF

SEQ ID NO: 529 - protein, 150 aa, Homo sapiens
AKPLAPGLNELVILHGHLAAEGLTSAHRRAVGVDDTVAALELELRVVPVGEDKRLLAGPGDPGAQQQPQARPVVLPGGLDGDEDVVRPQAGGSGPGQVRNSCKTYCPCLHLATVVSSWKPSIYVRHTSHGDTHIYVEVYCLKLLCGHTLL

SEQ ID NO: 530 - protein, 100 aa, Homo sapiens
  SITE (33): Xaa equals any of the naturally occurring L-amino acids
DYTEELLGLRRNPGCLNCGRVWEARPRQASSLXCCSTRAIFPSGVPASPARPVSLKELAVLAWAQSWEEQHSLAQAQSTEPAAWVEMNDVFTNEGISLLD

SEQ ID NO: 531 - protein, 201 aa, Homo sapiens
  SITE (24): Xaa equals any of the naturally occurring L-amino acids
  SITE (175): Xaa equals any of the naturally occurring L-amino acids
  SITE (181): Xaa equals any of the naturally occurring L-amino acids
  SITE (190): Xaa equals any of the naturally occurring L-amino acids
DPRRPASGGPGLLRRPPLLATGAXAMQPPPPGPLGDCLRDWEDLQQDFQNIQETHRLYRLKLEELTKLQNNCTSSITRQKKRLQELALALKKCKPSLPAEAEGAAQELENQMKERQGLFFDMEAYLPKKNGLYLSLVLGNVNVTLLSKQAKFAYKDEYEKFKLYLTIILILISFXCRFLFXFQGGVHRRXPPSSVRQLGPL

SEQ ID NO: 532 - protein, 131 aa, Homo sapiens
GGLLYFNNLIYPKVPKVIYWRLKHAFLPLGQHEASNSTGRHGVPWVDEAAWQPGLETWPPGQLWRAPQQSWSPAPQHGWPCGLRTLLITQCLVLGQPQRSVYKYSLTSGGLDGHHHSPDVLHCLSHFPPSL

SEQ ID NO: 533 - protein, 93 aa, Homo sapiens
  SITE (3): Xaa equals any of the naturally occurring L-amino acids
  SITE (53): Xaa equals any of the naturally occurring L-amino acids
  SITE (92): Xaa equals any of the naturally occurring L-amino acids
IGXKPRRCPGQVAAPHPSGAPKSCPATDLELPQSQPEPEAGVAPGCGSLRRPXRLPGLALPALCCVIRPVAAPLRPTRATPRLRVKGGETQXP

SEQ ID NO: 534 - protein, 79 aa, Homo sapiens
  SITE (28): Xaa equals any of the naturally occurring L-amino acids
  SITE (75): Xaa equals any of the naturally occurring L-amino acids
  SITE (76): Xaa equals any of the naturally occurring L-amino acids
SQLNYICRDSFQIRSHFQVPEQWLGLGXSFGAHFSTYYKDNCPLHRKRAGHISDGIDQGPANSVSKGPGGLWALXXRPL

SEQ ID NO: 535 - protein, 160 aa, Homo sapiens
  SITE (126): Xaa equals any of the naturally occurring L-amino acids
  SITE (147): Xaa equals any of the naturally occurring L-amino acids
  SITE (151): Xaa equals any of the naturally occurring L-amino acids
RPTRPAPSGGVVVAPSSSGRIVWSPAVPGIPVRSSSLPLFSDAMPAPTQLFFPLIRNCELSRIYGTACYCHHKHLCCSSSYIPQSRLRYTPHPAYATFCRPKENWWQYTQGRRYASTPQKFYLTPXQVNSILKANEYSFKVPEFDGXNVSXILGFDSNQL

SEQ ID NO: 536 - protein, 86 aa, Homo sapiens
  SITE (85): Xaa equals any of the naturally occurring L-amino acids
VSPCLVLSLLFQVPGASVPGTWDPHKPGNSQPSSFTQSKLRRPRERPWFSPLDAFYEQDFTRRHHYYWILHERALADIYIGLLAXW

SEQ ID NO: 537 - protein, 194 aa, Homo sapiens
  SITE (160): Xaa equals any of the naturally occurring L-amino acids
  SITE (165): Xaa equals any of the naturally occurring L-amino acids
  SITE (178): Xaa equals any of the naturally occurring L-amino acids
  SITE (179): Xaa equals any of the naturally occurring L-amino acids
  SITE (194): Xaa equals any of the naturally occurring L-amino acids
KADSPCSLSCWHRAECGNYCLNTIIEAIEIPQFIGRSYLTYDNPDILKRVSGSRSNVFMRFKTTAKDGLLLWRGDSPMRPNSDFISLGLRDGALVFSYNLGSGVASIMVNGSFNDGRWHRVKAVRDGQSGKITVDDYGARTGKSPGMMRQLNINGALYVXGMKEXALHTNRQYMRGSXXGSLTSPCHRYHNSSX

SEQ ID NO: 538 - protein, 308 aa, Homo sapiens; identical to SEQ ID NO: 433

SEQ ID NO: 539 - protein, 279 aa, Homo sapiens
LEAVSPRRKHLGFSRKHKRRQCVHYRLQPPFEARFLRFLPLAWNPRGRIGMRIEVYGCAYKSEVVYFDGQSALLYTLDKKPLKPIRDVISLKFKAMQSNGILLHREGQHGNHITLELIKGKLVFFLNSGNAKLPSTIAPVTLTLGSLLDDQHWHSVLIELLHTQVNFTVDKHTHHFQAKGDSSNLDLNFEISFGGIPTPGRSRAFTRKSFHGCLENLYYNGVDVTELAKKHKPQILMMGNVSFSCPQPQTVPVTFLSSRSYLALPGNSGEDKVSVTFQF

SEQ ID NO: 540 - protein, 177 aa, Homo sapiens
  SITE (5): Xaa equals any of the naturally occurring L-amino acids
  SITE (99): Xaa equals any of the naturally occurring L-amino acids
  SITE (101): Xaa equals any of the naturally occurring L-amino acids
  SITE (115): Xaa equals any of the naturally occurring L-amino acids
  SITE (166): Xaa equals any of the naturally occurring L-amino acids
  SITE (173): Xaa equals any of the naturally occurring L-amino acids
TAHMXLEFHNIETGIMTERRFISVVPSNFIGHLSGLVFNGQPYMDQCKDGDITYCELNARFGLRAIVADPVTFKSRSSYLALATLQAYASMHLFFQFKXTXPDGLLLFNSGNGNXFIVIELVKGYIHYVFDLGNGPSLMKGNSDKPVNDNQWHNVVVSRDPGNVHXFKIGFPXCQGA

SEQ ID NO: 541 - DNA, 27 bp, Homo sapiens
gcggcaagctttttgcaaagcctaggc

SEQ ID NO: 542 - DNA, 27 bp, Homo sapiens
gcggcaagctttttgcaaagcctaggc

SEQ ID NO: 543 - DNA, 4097 bp, Homo sapiens
ttttttttttttacattttattaataccaaagtgaaaaatggcctgtgcttatactacaaggatctcatatgaatgcagtcctgattgttcgacacagcaagaaaattcactttcacagtcaacaagtcatcttactcagtagaacacaaagtaaatggtttataactccaatatttgcaaggaaaatacagtacaaattactaaaaaatactaaaatatagaattgtgttcaggcatctccactacatcaatcgcagcagtaacctgaaatttgaaacttttaataaaaagttcttaaatataaattatatggcaaatgtacagtacattgctttttttcagtctctttttccagtgttttgcagtagaacagggttcctaccatcacctcccttaggtttaaaaaacccaaaacacaagtctgctgtgagtccttcagcatcatgagtgtgagtgatctgagtctggaataccactgtctctgtagcttcggttactactgctttcactgtgattgtttttgtacagattcattccattaggaggaaatatggtgtgtattacaaactcctccttcgagatgggttcattgcttattggtaacatctgaaaagaagtttccctgatttccaggatagagttgtccttcttagtgccagcttctgcatagtcatcctttcttctcctccctttgctatatgcacagttccttgagaagagcgatccattcctatgaacataccaacacactaaagcaagaagggcaatggtaaccagggccacagccccaccaatgatggcagccaaaggtaaattggggtttttgtaaggttctttctcttgctctcgattgagggtggttgtagggttgtacattcgaaggggtgcagtttcagtctcaatacaaacaggagtttcatcaaataggtagaggttgctggtttccatgggaaccatgcatactttatagggtgaatcaggctccagggctgtgaccaagtactcactgcgttcccctgttacaattgtttctgttatagatccaaatgccgggctatggcccagtttaagccagctgagtctcaaagcagtcataggtagagcaagtttccaagagatatgaatggtatcagaggtgacagacttcacagtaattgtaattgtttttcttgagggactccctgtggtttggtgatccttagtgagcttggggttcttaatatctggctgtttggtcactggagctggccactgtccttgggcaggatacactgtgttgggtattgcagtggttatctgaatggtgcttacaatcccactgtccttacaatcaaacagttctgcattgagatccttaatagccatcccacgaaccttttctggggcttggcacatgagcccacgcacgttgaccttcacaggtagtgattgtaaccagtcacgtacccatttcatcttgcacccgcaataccagggattgttgcgaagaatcagttgtgttatattgtccaaatcatcaaagataccctgaggtaaattacttaggttattattggacatatccagtcgatagagctgccttagataagaaaaagcatttgggggcacccgattgatgtggttatcttgaagataaagcttcctcaggtttgtgcctggaaggtttactggtgcagcagtcagggaattccgcaccagggacagctctgtcaaattaactaggttgaagaaaactttgtcacctaaaccatgattgttcaacaggtttccatctagaaccaggcgttttagactagtgagaccttgaagagatggtgatgaaatagtggatatgcgattatcatccaagcgtagttcttctatagtcctgggcaaaccccagggaattgtgctaaggtgattacgggacaggaaaagcagtcggagatagttgctgtctcggaatgctccctcttctatgctaactgcagagacagagttgtcatctaaatgtaattcttccagatagggaatttttgaaagtgaatcataagtgatagtccttatgttattttcttgcaaatgtaactcttttacatactttgggaggttggtaggaaattcatctaaactgttgtggtataggtatattctttctactttcagcaagtttttcaaatctgaaggaatcccagcattatttatttggttgttctgaaggtagagagttgtagcatcctctggtattcctgttggaatggatgtcagaaagcgatcattacagtaaatgaaacccgcatcgcagcgacacacagatggacaggatttagccataactgatagaggtgctacttgaaggaacagcccaattttagtcccgatgaggaagatgctccaggctgcgctgatcatggtcagcagtgttgaggtctttatacaaggtagcttccgttacttcagaaccctaaaatgaagtgagtaaaaaaagacagaaaacaataaggccagcatactgaatataatgtttaaaaacaaatgtggaaactaaaatatccataatcacttttaatattttcatttgttttgggagggggcataatagggtttattgctagctaacaatagacactgtcatataatctctttaccttaatggtttcttaatttctttataaattaaaaagtatctgtcctaaatccatttgattttgaaatattaaatataattgaagttttattgaataatccaaagtattttaattatactttatatcaacctttagacagtcactgatcaagctaattgaatatccatttcttacttaatattcataataagtaacaccttggaatattatttcttatatttaaaggtaatcattttactgttatcaaaaaaccacacatttttatatttactttttattaggcaaaaactatacaggtgtagaaaaatgtcataaaaatacctattctcttcatactcaggaatagttacacacatcttgagatcctcaatctcaaacccatagtttgctttgattattaatgtcatttcattttctttggttattaattttaagcattattttaaatggatggatttctgcaagaaaataagaatgattccttcatttatttttgggaaagaattacaaagctaatacatccagctaacctaagtggaaaatttcacttcatattaaattctgtctttcttctgttcacattttgttatatgtttcatactgcaggttttaatgactttgtccacatttttcattattttctacctcataacgtgttgtcacagtgcatttatatttctttgaattctaacctagaacataaatcaactttttctatggctggcaaagtatagatttatactgatgtattgtgtaatatagtctcttctgtccttttaagtattaattagcctttgtaattttaggcatgaaaataaaatactttgtttttcctaccttattgaacgatgtgagtaaattttgcgggggtgaatatccaatgcacatatattattttcctggtgagggactgggacttataaacttttgtttagtccttggaaatgttcttcaccgtttattcaagtaatcctatggcgtacacacctccagatcaggcttgctgttgtcaatgaacattccagctgcagttcagcatggtgggcaagctcattaaagtgggggcagaaacaattctgcttcctgttactatgtaggacacatggcttcctatgtattttttttttctttctgatagagtttctgtgtgaaagttccttttgtgtagcttaattcccttagtggaaattgccctctttgaaattcttattggctcttctgtgcaatgtggtcagagatagtaacttcagatcctcatgaagaaagtcattcatgatgctaaggcctgtatagtaataggtttttcaggcagttaccccctacctttattcccatccaggattatccaagtataaactttgtacagtagctacatcctgaggtatgattacctgctgtgaaatagctatttccagcttttgcttcttgctgatttttcagaatgtctggtgcagtcacgttatacaaga

SEQ ID NO: 544 - DNA, 846 bp, Homo sapiens
ttgattttttaaaatttttagccaacttttatttttatgcctagaaaaatacatgggacgtttaggactaatgtgctgggcaatttgctacttagtgatagtaacacaatcctgaaaaagcaagcacaattattctgtactttttaaaagttttattcagcaataagaccataatttttcatatttaaggagtatgaaaaatttgtggagttttaaaagctgaatacatgtagcgttggatcaaggcacatacaagactggccaaagggcgtacaatgcactttggttttttgttgaaaaaaaaaaaatcatggcaacagaaaagtgatatggtttttcaacaagtaacagctcacaattcagtaggaagctagaaggaaatgttacattacgagttcattatataatatctggaaaattgtgacagtaatgggcagtattcttgatctttgtaaaagtaaattgaacatttatgtacagtgttaaaacctttgacataaaccagatctaaatttgatgtctagtatttatttttctttaaattatctcttatttaaagaactactttctctggattgttgaggggaatcgcttataattacattacatttttaatatgcataaagtttctctgacatcctttatgataaaaacatcataaacactaacaattttgtgtttataattcacttttcaaaaatcaggatggtataggcaaaaccaaaatgcagttttggtatttgtgttcattacactatacaagtctaagtttccatgttttcctaagtacacattttccccccaacttggaagcacatttacattaccgtttttgtgaagtccttt

SEQ ID NO: 545 - DNA, 5351 bp, Homo sapiens
agttgattgagcctgctccttatctgtgaaatgagggtggttggccttgatgatcttgcagtaagatgtcctgatatgggaagtggagtcccaagctaagtgtgctggaaaggggaagggacctgtgtggataagctccccatggtctggactgattttgtcttttctgaatagattgctggttaccagtggccttccaggttgttatctgcaggtgtggcaggttgcagaggacagtggtgagtgaatttgacttgatggggtttggggttctaggaaagtgtgactcatacacccctgtcccctaatctgagccagttaagaaggagactcaggctggggacagtctcatgcctgtaattgtagcactttgggaggctgagctgggtggatcacttgaattcaggagttgaagaccaccttgtacaacatggtgaaacctgtctctattaaaaatacaaaaaattagccgggcatggtggtaggcacctgtaatccctgctactggggagactgaggcaggagaattgcttgaacctgggaggcggaggttacagtgagccgagatcatgccactgcactccagcctgggcaacaagagcaaaactccgtctccaaaaaaaaaagtagtagtagactcagagccaggtgggaattaatctactttaatgcagacaaggtgaattagcaaccatagcatggcatccaagccccaaatggagcttcctgtaacctgctcctggaattgagttcatccagagaactactctccctaggcaggggcagtggcaacagcagagcttaggctgctcaggtgagctcacctctttggcagcattaagcatatattaagagaagcctcagatgtagaatacagagaggagaacctccctgctaaccaagcaggtggagacaaccaaataaaaactaaaacttggctgggcgcagtggctcatgcctgtaatcccagcactttgggaggccaaggtaggtgggtcacctgaccaggagtttgagcccagcccgagcaacatggcgaaaccccgtctctactaaaaatacaaaaaaattagctgggcatgagggtgcacatctgtaattccagctactcaggaggctgaggcagaagaatttcttgaacctgagaggcggaggctgcagtgagctgagattgtgccactggactccagcctgggcaacagagtgagactctgtctcaaaaaaacaaaagaaccaaaacaaaacttgactcaaagccaaggatgttccattcagtgtaaaaaagatgtggactttcttgtccaccttacaagacaatgacatctgtaatgtgacctgtacttgctaggctttagcaagtcactcgaggtcatggaacatgtttttgaagaaataatatcagttcatgaattctgtacctgtttcttgtcgctgaaggggtaagtgacatcagcagcatgttcattccttttcttgtcttctacctgttctccacaaaagtataaaaagccagaattgctttttgggttttgagatggcattgtcttccatttgcaaaaaacagtttataagacaaataataaagaaattgaaatgtttctgatggtttcaaaaatgtaaacataagccagagtagttatgtctcaacatcatctcttgccagccggcagctccttttcttccttgatcttctaaatgtacaggggaagacagctggcagcctgtcatgtttcaaaccttcattaaagttctggattttggcctcttcgttttcccctagatgtcattaaagctgtcagcaccattgctgtgcatgagaaagaggagagtctctggcctagggtggccgtcttctccacattggcacccggagtcctccatggggcgaggctccgaagtctgcaggtcgttgatctggagtcccggaagaccacgtacacctcaggtaccgtggtactttgtcccttgcttgctgctccagccggcatcaccccccagcccaactcagccactataaaaactgagttcaactctctgtgccaggtgttggggatacacagtgaataagaggtaagccctggcctctaagggctcctatgctggggcaggattaggcagtcccagggaccagcacccaaccagctgagcagacaatggtgagatgagtgggaagggagatgtgatttattctgcctgggactggtgggaagggacctgtgaccagccagccctgccaaattgccagacccatctgcctccagccgcttgtctcctttgctgtcggtcttccagatgtcagtgacagtgaggagctgagtagcctgcaggtcctagatgcagacacctttgccttctgctgtgcttcaggccggctggggcttgttgacacccggcagaagtgggcaccgttggagaatcgcagccctggccctgggtctggtggagagagatggtgtgctgaagttgggagctggggccagggccctgggcccagcattgccagccttggctcagatgggcgtctttgtcttcttgacccccgggatctctgccatcctgtgagctcagtccagtgcccagtatccgtacctagccctgacccagagctgctgcgagtgacttgggccccaggcctgaagaattgcttggccatctcaggtactgccgagcaggatttcgtcttgttatctgatctctttcttccaggagactgttgggtgctcaggaaggagcctccagcaccatgataaacctggctccaggagttaaagttgctcacagagaaattcgaactctccaggttcttcagtggcaggccttttcctaccctggctactaaacttccacacattggcagcaggcctttcctagcctagcaggaattcaggtctcaggttggtggaggggcctgcagacagtaagacactgggacagacatcgggctgggtcagaaagaaaaggggacagtggctaacacggtgaaaccccgtccctactaaaaatacaaaaaattagccaggcatggtggcaggcgcctgtagtcccagctacttaggaggctgaggcagaagaatggcgtgaacctgggaggcggagcttgcagtgagctgagattgcaccactgcactccagcctgggcaacagagcgagactgtctcaaaaagaaaaaaaaagaaaaaaaaaaaaaaagcagcagggacagcacctcaagggtacttctcagcctacttgccttttgaaatgtagcaagttggccgggtgcggtggctcacacctataatcccagcactttgggaggtcgaggcgggtggatcacaaggtcaggagatcgagaccatcgtggccaacatggtgaaaccccgtctctatgaaaataaaaaaaattagccgggtgttttggtgcacgcctgtagtcccacctacttgggaggctgaggcaggggaatcgcttgaacccgggagtcagaggttgcagtgagctgagatgacgccactgcactccagactggcgacagagcaagactctgtctcaaaaaaaaaaaaaaaaaaaaaagtagcaagccagctaggtcagcaggcccctggttctggtctggtggtagctagttgcttgcggcacttaatgtgggtatctaaaagccaacaggaaggatccgtcgaggcaggtgggggttgaaaaaaatcattaagagagcaagaaaggatgattggaaatgccaggatccagaaagaacagaagagccaagctcaggtagaggggctggctcttcagtaccaggaagatggcaggatggaatgagtgtgtgtgcagctagatcgtgcagggacgtgaaggtatttctctccaaaggcttctgtttcccccatcgagtaggagacaaggccatctgctgaaagggacccagaggtaggggactggactctggggcaacttgaaaaggtttgaagaagtctcttaagcctcagtttcctgggtaaaataacagtatctgtgtcatacagttctgaggattaaaagagctaatacttgtccagaattagccttcgagcctcacgcataacaggtgcacaacggatgctcatggttacatgccccacggagtcatcagctgccaacactgagggcagatgctacttgcccgtggttagccttttaagtgccttgattcctcatccaatagcctgttttggtaccatagaacaaattataaaaagtattttaggggctgggtgcctgtaatcccagcattttgggaggctgagatgggaggatcgcttgaggctaggagttcaagaccatcctggtcaacatggtgaaaccccatctctattaaaaatagaaagaaaattattttaaaataaaattagggactcattgtcaagcctctcttttctgtattctcaggttttgatggtacagtccaggtctatgatgccacatcttgggatggaacacggagccaagatggaacacggagccaagtagaacctctcttcactcacagaggtcacatcttcctagatggaaatgggatggaccctgctcctttggtcaccacccacacctggcatccctgcagaccaaggactttgttatcagcaacaaatgatgcctctctgcatgtgtgggactgggtggacctttgtgccccccgctgacaccagcatctttccatctaggcctctagaaaggggaggagctgctgtagtagcaagggtgctcatgtaggactcaagtgactaccagtccctgttaccagctgtgtggccttgggcaagtctgccagcgtcacttagcctcagtttccttatctgtaaaatgaggatagtaagaactacctcgtagtgatattgcgaaggttagaagaaacgcatggcataattacttggtagctattgttagatctgggagtgtgaaatggtagcgttttgtccctgtcttcacactatcatagggagaatcaaaagagctaacaaatataaacatgctttgtgaatttttttaaagaaaaaaatgtagaggggccaataaacatgaaaaaatcccagccctagtagcaattaaggaaatagcaaaacaggatttctgctcctcttgagtgggtctcatgggaacacaggtgcactttcccacacttgtccccccaggtgactaggttcaagagacatttgcttttggtggccccacaaacatttccttttgagggcccatagtgaatattaaagtgtgctggacatggtggctcatgcctgtaatcccagcactttcagaggctgaggtgggcagattgcttgagctgaggagtttgagaccagcctgggcaacatagcaagatcccttcccttaaaaa

SEQ ID NO: 546 - DNA, 6461 bp, Homo sapiens
cttgctctgtcacccaggctggagtgcagtggcgcgatccctggctcactacagtctaaacctcccaggctcaagtgatcctcccgcctcagcctcccaagtagctgggactacaggcatgtgccaccatgcttggctaattgttaaatttttttgtagagatgaggtttcactgtgttggccaggctggtctcgaacgcttggcttcaagtgatccgcctgcttcggcctcccaaagtgctgggattactggcatgagccatcactcctggccccaaacttcttaaaaaaatttttttttttttttgaggtctcactctgtcacctaggctggagtgcagtggcgcgatctcagctcactgcaacctctgcctcctgggctcaagccatcctcccacttcagcatcccgagtagttgggaccacaggcatgtgccaccacacctggttaatttttgtattttttggtagggacggggtcttgccaagctgttctcaaactcctgagctcaagcaatcctcctgcctcccaaagtgctgggattccaggtgtgaaccaccgcacttggccttttttattttgttttgttttaaattatttaatgaaataggaaacaatccgagtgcggtgactcatgcctgtaatcccagcaccttgggagcgggagaccaacgtgggcagatcactagaggccagaagttcaagaccagcctggccaacatggtgaaaccccatctctactaaaaataaaacaaatttggccaggcgcgtggctcacacctgtaatcccagcactttgggaggctgaggtgggcggatcacaaggtcaggagttcgagaccagtctggccaatatggtgaaaccccatctctactaataatacaaaaattagccgggtgtggtggcatgcgcctgtagtaccagctactcaggaggctgaggcagaagaattgcttgaacctgggaggtggagcttgcagtaagccaacatcaagccactgcatccagcctgggtgacagagtgagactccgtctcaaaaaaaagaaaaagaaaaagaaaattagccgggtgtggtggtatatgcctttaatcccagctactcaggggaggctgaggcaccagagaatcccttaaacccaggaggcagaggttgcagtgacctgagatggcaccactgcacttccagcctaggtaacagcatgacactccgtctcacaaaaataagtaaataaatttatcttagggcctcaccatgttatggagttgagtctaattgtttagaagagaagaggctaagaggctagacaaggacatagaaaaacattgttcagcctgggagaggctagatcccatgcagatgtggcccagtttttatcaaagtagcctgaggaccaccctaccagggccattaggagtgctggctaaaatgcatattcctagcatacttcccaaacatactgaattataatctcaagagggaaagcttaggaaaaatgccaagtttgtagactgacatggtgactcacacctgtaatcccagcactttttgaagctgaggcggtggactgcttgagcctaggagttcaagtccagcctggacaacatggcaagcccatctcttcacaaaatttaaaaagttaaaaaagaccaggtgtggtggcttatgtctgtaatcccagcactttgggaggctgaggcaggcggatcacctgaggttgggagttcgagaccagcctgggcaacatggcaaaaccctgtctctactaaaaatacaaaaattaactgggtgtggtggtgcacacctgtagtcccagctactcaggaggctgaggcaggagaatagcttaaactggggagacagaggttgcagtgagccaagatcacgccactgccctccagcctgggctacagagtgagactctgtctcaaaaaaaagttaaaaaaaaaaaaaaagccaaatttgtactcataaaacccagaggctacagaagctatagggtagcacctagtgttcttcatcttccccatctccagtcaggcttgagtcaggggttcacccagactgagcctagctgtgagaactgatttaacctccccgctcaccaccagctttgccttgtttcttctatggccacctccttttcccttgcctctggttccttacatggagatagtagagcctagtggctaacagtgtggacttgggttagacagactttggttcaaattcacaacttaatacttgtatgaccttatataagtggctgaagctccttgtgccttagttgtgtcatttgtagaatagggataattatagtacctatatcataggaggttgtaagaattaaatgtgataaagccctaaacactgcgcctgacacagtgaatactgataagttgtaattgttaatttttatcgttagaggaacccacctgacttccagcgggagaatggagggagaaatggggatgtgttcattgctctctttgatgaagctgttaagcttctctggcttctctaggaaggcctggagtataatgcttgtgctgtagtaaaaggggctagtgaaaggctaggagaagggttttggatgtgcaaaggaaaaaggaagctgtacgtgtaggcagctgagaccaacattgccaaataccaggacaccaacgccctttcaccagctgagtggcttccatggcctcctgccaggctaggacctgactcctcacttagagttcctctgaaatgttcatttgaagagctggctctgattggctactcctttgtattttagggcttattcccagaaagagatttcaaagtgcgccatggaggattttcagacaggtctatctttgatctaaagcatgtgccacataccaggtatggtcaattttgtgatccagccatccacacaggatgggatgggatggctgcaaatgcctgggggtattctgcctcctcatctccattcccaccccctcagcacacaggcacatgtgagtgcacaagtgtgtgcacacagatacacacagatttagaatacaaagaaaccactgctgtggcttcatagccccccagagcccttggactaatgtaagtaacagttctaccggagttgctccagggaatagatacgggacagaaagatgctcttctattgctcttgggtgataattgctcagttgggagaggccaagagtctctgggtcaggttgtgtttggccccatacttgtgtcctctgtaggtgaccatcatgacacatggaagcttgggctcagtctccctaaagttgattgagcctgctccttatctgtgaaatgagggtggttggccttgatgatcttgcagtaagatgtcctgatatgggaagtggagtcccaagctaagtgtgctggaaaggggaagggacctgtgtggataagctccccatggtctggactgattttgtcttttctgaatagattgctggttaccagtggccttccaggttgttatctgcaggtgtggcaggttgcagaggacagtggtgagtgaatttgacttgatggggtttggggttctaggaaagtgtgactcatacacccctgtcccctaatctgagccagttaagaaggagactcaggctggggacagtctcatgcctgtaattgtagcactttgggaggctgagctgggtggatcacttgaattcaggagttgaagaccaccttgtacaacatggtgaaacctgtctctattaaaaatacaaaaaattagccgggcatggtggtaggcacctgtaatccctgctactggggagactgaggcaggagaattgcttgaacctgggaggcggaggttacagtgagccgagatcatgccactgcactccagcctgggcaacaagagcaaaactccgtctccaaaaaaaaaagtagtagtagactcagagccaggtgggaattaatctactttaatgcagacaaggtgaattagcaaccatagcatggcatccaagccccaaatggagcttcctgtaacctgctcctggaattgagttcatccagagaactactctccctaggcaggggcagtggcaacagcagagcttaggctgctcaggtgagctcacctctttggcagcattaagcatatattaagagaagcctcagatgtagaatacagagaggagaacctccctgctaaccaagcaggtggagacaaccaaataaaaactaaaacttggctgggcgcagtggctcatgcctgtaatcccagcactttgggaggccaaggtaggtgggtcacctgaccaggagtttgagcccagcccgagcaacatggcgaaaccccgtctctactaaaaatacaaaaaaattagctgggcatgagggtgcacatctgtaattccagctactcaggaggctgaggcagaagaatttcttgaacctgagaggcggaggctgcagtgagctgagattgtgccactggactccagcctgggcaacagagtgagactctgtctcaaaaaaacaaaagaaccaaaacaaaacttgactcaaagccaaggatgttccattcagtgtaaaaaagatgtggactttcttgtccaccttacaagacaatgacatctgtaatgtgacctgtacttgctaggctttagcaagtcactcgaggtcatggaacatgtttttgaagaaataatatcagttcatgaattctgtacctgtttcttgtcgctgaaggggtaagtgacatcagcagcatgttcattccttttcttgtcttctacctgttctccacaaaagtataaaaagccagaattgctttttgggttttgagatggcattgtcttccatttgcaaaaaacagtttataagacaaataataaagaaattgaaatgtttctgatggtttcaaaaatgtaaacataagccagagtagttatgtctcaacatcatctcttgccagccggcagctccttttcttccttgatcttctaaatgtacaggggaagacagctggcagcctgtcatgtttcaaaccttcattaaagttctggattttggcctcttcgttttcccctagatgtcattaaagctgtcagcaccattgctgtgcatgagaaagaggagagtctctggcctagggtggccgtcttctccacattggcacccggagtcctccatggggcgaggctccgaagtctgcaggtcgttgatctggagtcccggaagaccacgtacacctcaggtaccgtggtactttgtcccttgcttgctgctccagccggcatcaccccccagcccaactcagccactataaaaactgagttcaactctctgtgccaggtgttggggatacacagtgaataagaggtaagccctggcctctaagggctcctatgctggggcaggattaggcagtcccagggaccagcacccaaccagctgagcagacaatggtgagatgagtgggaagggagatgtgatttattctgcctgggactggtgggaagggacctgtgaccagccagccctgccaaattgccagacccatctgcctccagccgcttgtctcctttgctgtcggtcttccagatgtcagtgacagtgaggagctgagtagcctgcaggtcctagatgcagacacctttgccttctgctgtgcttcaggccggctggggcttgttgacacccggcagaagtgggcaccgttggagaatcgcagccctggccctgggtctggtggagagagatggtgtgctgaagttgggagctggggccagggccctgggcccagcattgccagccttggctcagatgggcgtctttgtcttcttgacccccgggatctctgccatcctgtgagctcagtccagtgcccagtatccgtacctagccctgacccagagctgctgcgagtgacttgggccccaggcctgaagaattgcttggccatctcaggtactgccgagcaggatttcgtcttgttatctgatctctttcttccaggagactgttgggtgctcaggaaggagcctccagcaccatgataaacctggctccaggagttaaagttgctcacagagaaattcgaactctccaggttcttcagtggcaggccttttcctaccctggctactaaacttccacacattggcagcaggcctttcctagcctagcaggaattcaggtctcaggttggtggaggggcctgcagacagtaagacactgggacagacatcgggctgggtcagaaagaaaaggggacagtggctaacacggtgaaaccccgtccctactaaaaatacaaaaaattagccaggcatggtggcaggcgcctgtagtcccagctacttaggaggctgaggcagaagaatggcgtgaacctgggaggcggagcttgcagtgagctgagattgcaccactgcactccagcctgggcaacagagcgagactgtctcaaaaagaaaaaaaaa

SEQ ID NO: 547 - DNA, 618 bp, Homo sapiens
taaatgctgagtatgtcaacttttatttatttattaaacatttgtggagctcctgttatctaccaggtattgtcctggatactagaaagagagaaagcgctaggcctgcccttctagtctaacagagggaggcacatatgcacagagataaatgctgtagaatgtctcgtggtttacagagggctatcagaggaggaggtcagttatactttatcagaaatagatttagggagcgattaaggatatagagggcggtcgaaatgcgtagagtgattaaagtcacctagtgaatgtgtggtatataaggagtgaggagaatatagtgaggacggaacctcagggaacacatttaagggatgagtacaggaagatgcaccccccctccccaaagaatactaagaaagaacagcctctgaggtaagaggaatctcagaaaaggtcaatgtttctgaagccaagagaagagaacttctcaagaaaaaaagagttagtagctgtctagagttccaataaaatcattgagagaagaattgaaggccaggtgcagtggcttacgcctgtaatcccagcactttgggaggccgagttgggcggatcatgaggtcaggagttcgggac

SEQ ID NO: 548 - DNA, 13485 bp, Homo sapiens
tgcatgtcatccttctaaacatttaattcagcaattcctacattgtcatgacaaaaatgaaacttgctgagggttacagagttctaatcagaaataacaacttaaaaatctcacaaaagctctacgtaagcctgtcgtaagggctgcactgtattccgaacatttattttgaaaacaattgtcaaaatgtaaaatctccagcaccctcaacatgatgtagccttttggctcattctatacgtttgtgatcatctttgtaactccaagttttggaatatgaaaaagcatgatggcaaagaataataacaagacatttgtttctccatgccctgcccaagacttgatgcaccgtgcgtgccccattaagcggtggggtggtccaacacgtcagttagtaaagcagcacttgctggtgctctgcctgctctgaattcagttccgaggctgtgagttgaactctgtacaaatgttctggatgatcctggggacatactgatggaggttgtcaaactcgtccacaaagaaggagtggtctctggcggggtgagtggcaatgacttctagctcctcttgggcagcccaggcaacgcctatcgcataggtgatcactcctgtggggacaaaggttagatgaacaaatgtccccaagtaaaggtgctgctaaagaatctctctcttcttgtggccctgttggcacagccaaatccaaaatcagaaatatgcccaaacaaaacaaaaccaaaaatacgctacaggcctctaggtttccagaataaagactaagtatggccattcatttattcactcaataaatgcctttgagcatacactctatgccaacagtaacaacgtttatataattgttatctcaggagtttatagtattttaggaaacaatgaacaaaatggagtaaataacatggtaagaatttcatgtttgggaatagaagaggggaagatattttgggacaagtgaaacttttggggccatgcagatcagaatacatgacacatgcctgctctaccagtgggaagagccaagcaaaatctgagagagccttaaatgccatcaaaagctggttcaagatcttttaaactaaaacagtggaatggaatcactttaggcttgagggtgactttacaaaccattgaatccaacctcatttccagtgcaggaacccttgccaaaggtgccagagagatggtccccagcatgtgttccaacattgtgatgaagaaaggcttccaagataaagaaaggggtgtccaacactgttgggtgctacagggcagtcatgtaagatgaacatgaaaaagtgctcaatgggtttttgtttgtttgtttgagacagaatctcactctgtcacccagactagagtgcaatggtgtgacctccactcactgcaacctccgcttcccaggttcaagagatttttgtgcctcagcctcccgagtagctaggattacagcatgtgccactgcacctggctaatttttgtatttttagtagagacagggtttcaccatgtttgccaggctggtctcgaactcctgacctcaagtgatcctcctgcctcggcctcccaaagtgctgggattacaggcatgagccaccgtgcctggcctcattggatttttaaaaaagcaaaaacaggctgggtgcggtggcgcatgcctgtaatcccagcactttgggaggctgaggtgggtggatcacgaggtcacaaaaaatcctattttttttttttttttttttgcaaaaaattagccaggggtggtggcacatgcctgtagtcccagctactcgggaggctgagacaggagaatcacttgaacctcagaggcataaggttgcagtgagccgagatggcaccgctgcactccagcctgggtgacagagcgagactccatctcaaaaaaaaaaaaaaaaagaagaagaaaaaacaaaaccaagacactggtagtttggtgagaacagtttcagggaagaagatgccaaagaaaccaaatgaactactgtgagttgagactgaaaaagaagtgagcatgtggggtcagcatctcctttcctgaagtttggctgtgaaagggagtcagtaggtggtaactggagcagaacatggagtcacagaaaatgttttatttatagggagggaggaactggagcatgtctaggtgcaaatgggaaggagtaaaataagactgcaggtgttggattgcagtggggagaagatgacccagggaggagaggatgggattcagagataaggcatccaatcttagtgggaaaactgggagactgcccggggtggtgggtcttgatttgggttgtggacagctggtcagcaggtgcttgaccttactctacaatagcctattctcgcgccaccttcaggctggtctgagtagggtaagcaaaatggccatgaaacagagggcagagcctggatgtagccttcctgccctggcacctccccccgagtcccccacagtgttgtcactatttccagcatcttctgggtgcctgggagagccgtgcatacctcacgtggctctgacctaagctgctttttgattgtggtccattaaattgcatttaagctgccagtcccctttctccctcctccagtttcttttctcggaacattgtctagattggaaggagccagctttgggctttaaagtgctgccaggtgtcagtgagagcagctttgctgcagagctgggtttagacagtctaagccctccttcccgctcaaagatggagaggttgcccttaaaaaactacgcaaacagtattagaaatttagctctccgggccaggcgtggtggctcacacctgtaatcccagcacttcgggaggctgaggtgggtggatcacctgaggttaggagttcaagaccagcctagccaacatggtgaaactccgtctccactaaaaatacaaaaaaaattagctgggtgtggtggcaggttcctgtaattccagctactcgggagactgaggcaggagaatcgcctgaacccaggaggcggaggttgcaatgagccaaggttgtgccattgcactccagcctgggcaaccagagcgaaactccgtctcaaaagaaaaaaaaaaaaaagaaagaaagaaaaaaaagaaaataaatttagttttccagatcccaagtccactcttgttgtacagaatctcctactggcaattctaacagatggtcacccagccttgacttggatactcccaggaacacaatgctcattacatttgcagacaaatctcagtgttaagctgagtaagaatctgcctccaggtaatttgcatattttggtcctagttcattaaggctgcgctgacagcacctcagccatttccctcagtcttcatttttcctgatgagtaggccaaggataccctctgattgaggcccaaaagacgtacatctagaaaaaaaagtgatgatgtagctgagcacaaactggggacagatgtttggagaaagcaggagagccttgggcttgccgtcaaagctggcccatctggctctgcccattcaatctaggagtttgggccagttgcttctgagccttaatccgtcttcaatctgctgatatgagcctggtggaccttgtgattgttggcatgcaggccaccagccatcccaccattatgagggtgccctacaggctccataaagggtaagtcaccgggaagactctgcctgaaccccgtctctggctactttggattctaggaaccagcattgttgattcattaaggcttgttttaggaagaaatgaaagtagctttcaaccattcagaaaatcctgccaaataactgaaattaaatgtaggcacagaagccaggtgcagtggctcatgcctgtgatcccagcactttgggaagctgaggtaggtggatggctataggtcaggagttcaagaaaagcctggccaatgcggtgaaaccctgtctctaccaaaaatacaaaaattagctgggcgtggtggtgtgtgcctgtaatcccagctactcgggaggctgagccagaagaatcgcttgaatccgggaggcagaggttgcaatgagtagagatcgtgctactgcactccagtctgggtgacagagcaagacactgcctcagaaaaaaaaaaaaaaaaatttaggcacagaagaagaaataacaaccacagcactgagtgagttgtgtatattcatatttgtctacagggcattggtgttcattgactacttggtttacttttattagtagtagtattattattatcacttggggttttctccaggctgtttatgttcttgataacttatgacactttttggatcagtgattatacataaattctgcaataaaggcataaacgtggctgattttctaaacatttacagacatattttgctcatttttcatattttaaaattttgttgccctcttagaaatttttatgtggacatagctctttgaacattttatttttttgagacagagttttgctcttgttgcccaggctggagtgcaatggcacgatctcggctcaccagcaaactccacctctggggttcaagcaattctcctgcctcagcctcctgagtagctgggattacaggcgtgtgcctccttgcctggccaattttgtatttttagtagcgacggggtttctgcatgttggtcaggctagtctcgaactcccaacctcgggtgatccgcccgcctcagcctcccaaagtgctgggatcacaggcgtgggccattgtgcctggcccttttttttttttttttttgagacaggatcttgctctgttgcccaggctggagtgtggtggtgcaatcatagatcactgcagcctccaactccagggctcaagtaatcctcccacctcagcctgccgagtagctgggataataggcgtgcaccaccatgcctggtctctttaaatattttgaatcgaaattcctttcaggtttccctgaagccccacgaatctggttaacagttgcttacagaaaaagtacttgtctttaaaaacattatttttccttaaaaggtaccagtacatggctaggcatggtgactcactactgtaattctggcactttgggaggccaaggcaggaggatcacctgtcaggagttcgagaccatcgtgaccaacatggcgaaatcccatctctactaaaaatacaaaaattagccgggtgtggtggcacatgcctgtaatcccagctacttgggaggctgaggcaggagaattgcttcaacctgggaggcagaggttgcagtgattggagatggcaccgttgcactacagcctggacgactgagtgagattctgtctcaaaataaataaataaataaataaaagttactaacacaagttggtggtctaagtaccagtacaatttgacatattcaatagagatggaggtttggtgtttttaatagaggtaaagtgatgagtcaaattcccttttaatgtatcatgctcttgtgggaaatgcctcagggtgcaggatgtaaagaaagggttaatgcgcccagtcatccacaggccatgggtttgtaatgacacttaggagaccaccttgctgccccatccttgttccttctccctactcagaggggcttgcagtgtttctacccctaatgccctccctgcggctttgaacatttttattaagtcgcagaaaaaaccaatgcataaaaagacaataccttccttgtcccactggcccaccaagccccagaaagcagcctcagcaccaggctgcttggcaagcccagcttacccttcagatgggcagccatggctgggatccggacgtcgtcgtaggacctcccgtcggtgatgaggatcattaacttcctcttgttgggcttggacttcttgaagagctgctccagggcgaagttgatggcagcccccgtgctggtgccaccactccagtagcccaccctcttgatggcgttgaggatgtcaggcttgctgctgtacttgtcgaacccaaactccagccgctgttcgtaggtgtactgcacggccccgatgcgcgtgtccgtgtcggaaatctcaaactctttggtgaggttggtcacaaactggaggacggtgcggaagttgcccgtccccacactgctggagccgtcgatgacgaagccaatgtcagccgagttcaagcaggtcttgctgcaggccaggcggtcagtgtcgcagacccgcttcaccagaggctgcagggtcttgtggaggccaaaccagctctgcacgtggagcgagtagaagccgtttgttctgcacacggcctagaagacagaggggagggacccacgccacgtcagggtcaaatcctccagtgtcaccattaggcttgatcccccggggcaggtgaagaagcaagcaggcccttgttttctgcactagccctcctaccgtgttcttccatctcggttcacccagcggccactcactgaggcgaagcccccgggttatcgctggactcagtcctactccctcagctgagtccctgcctgcgttagtggaaagctgtctgctaagcaaattcatagggagaaattaaatctctggtgtcagcttcacatttatgcttctccgggctcctcctttgtactggcagccagccataagattggaattcgtgggtaccatggcatgagaggactaaagaaagcttttattccagttcggaaaagagatgacatacacaagaaatcgctatggaaatgtctccagagcagccctgttccaggcgggaagggatcccacagttgctgaatgaccacatgttaggggtcccatcagatgctcttggaatgattctctcattaaatccccaccttcaccctacaaggtggaatcataaccccctgccacaaaggaacaaactaagctatgaggggacttccctgagtccctgagattggaacacaaacctattcaccttcagaaccagacaactctgcctccaggcaaatgaatatttatttaccagtgcctaagcttattccagaaaaaaataaggcagctgcaaatacaccttgagcaaactgattgttgcgctcccggaagtggctggtataatgttcccaaggcgtggtgtttcttccttacccctgcctctgggtcacagaaagagtcagaccagacaactacccttgtataattaaaagattattttagaacaagagatggcttcaaactttcctggaaaatatttttcaaaaattgatttgtaaaaacctaaatggagttcacaaaactttccgtggagctcatgacatgtgaggtaagtgctgagcttgagctgaattctggccaacagatggagggagggatttccaccaggcagtgaagtcacagcaggagacagaggcggtgctgggtgtggatgggagactagctggactgaacacagggctgtggggggtcataatagatgggccaggagagtaggttgggactgcaccccagaaggccttgagagcaatgggtagcaatgaaggatttggagcaaggaccccacaggactgagggaacccatcagaaatgtgagttgggcttcattgtgaaatctaaactaacctggggagcaccaggagggagaaggaccagatggagggtaccagcttgaactggggagggggcgtcaggcgagggaaagaggagggagagagatctgtgatgtgggagctgatgaggagttctggggtgacactgccctctgggatgggtgtgtggtcattcatgtaaagtccagaggaggaaacagttcagcgggaaggatgatgaacttggcttgttataggtgggatttaaggttctggtagaacatcaggtggagaaaagtcagtcagctgaaaatggatggctacagagctcaagagatgaaggtagggccgggcgcagtggcccacgcctgtaatcccagcactttgggaggctgaagcgggaggatcaagaggtcaggagatcgagaccatcctggctaacatggtgaaaccccatctctactaaaaataaaaaaataaaataaaataaaaaaactagctgggcgtggtggtgtgtgcctgtagtcccagctatttgggaggctgaggcaggagaattgcttgaagctgggaggcggagactgcagtgagccgagatcgcgccactgcattccagcctgggcgacagagtgagactccgtctgaaaaaagaaaaaaagagataaaggtggaagcagtgaccctgggagggatcctgcaggagagggcctcttaaagaggagggtgtagacctggggaggtcaacattgagggtagaaaaaaggcaagaggcaatgaaataagagccatacagcatcctggaagtccagggagaagggcatttcaaggagcaggaagtggtcatcagtttgaggtggtgcaggaggttgagccctgctggctgtagacacatagaatattaaagctggaagggcctcaaagacaaacctgtccaaggcttgctttctattttaaagctggagccttttctttggaggaagttttatgtggtgttccactgtacaaagggaacagctttggtggagtgagtgagggaggcattgctccacatctcctgctgggcatctccacagaacccaggaggagcatctgaaaacgcgatctcactgctgtggttcagtgcctcctttctctggtttatcaggttgatgaatcggcaatgtgtgtatacaggagaaagcgtgtgtgtgtgtgcgtgtgtgtgtgtgtgagagagagagagagagtatgttcgcttgcatgcatgtgtaaaggctccttgggctgcctgggtgagaccccccctggggctgtggaaggagcaaggaagaacctagctgagaattcgagtacactgctcctccacagctgctggtgggtgtggggttttgctttgagagggtaattgcaggtttcggattgaccagtccctccctggaggccttactgcctagagatgagcttcatgcacatttaaaggcatgggaaaaccactgcaacggcgttacaatttttcagagtgcagaaaatcctgatgttgggtaggtctccgggcagtcatctaccttgtttgcaaagttgggctccaccacatactgcttctcattttcagcagcaccttcaatggtgatgaagaaaatgttgattcctgactctctcgcaagtcttgaagcctcctccactttgtccgtgggccagccatccaccatcaccaccaccacattgggagccccgcttctgtttccattggctttggaaaagaagttcttggtcacaaaggagatggcccgacctggaagaaaaagaaaattcatgcttggagtgatcacgctgattataaatacaggaagagatcacagcagcacaaagaggtccagaaaaatacactcattccctccctagtttttttttttttttttttcctttgagacagggtcttgctctgttgcccaggctggaatgaagtggttcgatcacagctcactacagcctcaacctcctgagtttcatcaaccctcccacctcagcctcctgagtagaagggactacaggcgtgtgccactgtacctggttaattttgtgttttttttgtagagacgaggttttgccatgctgcctaggctggtctcaaactcatgggctcaagtgatccacccacctcagcctgccaaagtgctgagattacaggcatgagccactgcacccggcctgttacttttttaaaatcacttcaactatttttatgtgtacaattcagtggcattaagtacgttcacaatgtgcagccgttaccactgtccattttggtttcatttcaagccttcaacttctaattgtctccgctttgaagaaagttttagggacagcaagcaggtgagaaagactttttttttttttccctgagacagattctcactctgttgccaggctggagtgcagtggcacaatctcgactcactgcaacctccacctcccaggttcaagtgattctcctgcctcagcctgccaagtagctgggactacaggcacgcaccaccacacccagctaatttttgtatttttagtagagatggggtttcaccatgttggccaggatggtctcgatctcttgatcttgtgatctgcctgcctcggcctcccaaagtgctgggattacaggtttgaaccaccgtgcctggccaaagactttcatgcgaacagaagtgccccttttctgctggacccacactaagcccctaagccagccccatgttgtttccaagagtgtagggtgggaggagttgacctggagtgacagtagcctcttcttggccccctgcagcctggggtgagcctgaggctcctgctggctgtacagagctgtgttctggggtcaggagtgtttttcctccagttccaggccaagggcacaggtctggttgggcagggaagagttgcacccactgggaactgacagactgtgttctagccctggctgtgctacctgctagctgtgtggccctgagtaggtcaccctacatctctgggcctagctttccataacagcaatctacttcagctgagtgcagcagccatgaagtgctacaaagcctcctgccatgacttttccaagtgcatatttcacactgagaagggcttcaggaaattttcagagtcaactagacaatgaccaattgtctcagtttgccaggactttcccagttttagtactgaaagccccaggtttttctgggaaaactgggatgaccgttcaccctagagtcagcatggctgtatagagtaggcagagctcttaacctgggctctgtgaaccccagggcacttgaaattatacacagtattttgtgtatataagtatctgtctggatagaagggccatagctttcacggaattctcaaaggagtcctcaatctccataaaagttaagaagcaccttctttagactttaggattagtagtattatactcaatgcatttctgattttggccagcatcctgtctccactagctggtattatcttacttgtcaaatgagagcatcaaatggttacatatacagatgctgcagaaatgtcttggaaaacccatgtgaactggctgcacagaacccacttgctaaggaaaaaccttggctgctaagaattgcttttatagccaatggacaatttttcccaaagcacaaagcacccggaagtcctctctggcctaatattaggcacctatagggcagagcacaagacgccatgagaagatcccctcaaccccacctaaccttatatctggaggccatggtgtatagtgctcaacacacattccatccaccttccagtgggtcttgaaaatagaggctggaaatcagaaaactacattttccagactcccttgcagctagggatttagctttgttttagttccatgaattgatgcacttgcatgagatttagaagataaaagtgaggcagaggctgtacttttgtttatatttctgctgacaaatatctttagtatctgacttctctgggatactgtccgcagaggtgcttggggttggttgctagctgcagtggtttggggcggcagggtgtggagatccatgttgtgggtgtgaatggcacagggagggcgtggttctggagctggcagctctagaagaagcttcctgatctcctgatcctgctggcttcctggacaaagcaggtttctgaagaggttgccatggcaaaattcagaaagtgatttcctaatcttggaagaaggagcagctcccttggaggtcctacttctgcaggaagccttcagacatcatctcttaaagctcagcctacagtctgcttcttcagttcttacagtgattctccaaactacttaatagcctgaaattccaaccctttctgttggaatcagttgaacggattctgtcctcagaacccaaactctggacaatacagaggcaaagtcagaacatgtcatccactgaaaaacgtatgctgattggattgagacccatcgctaacctcgtcaaggaacgagagtgccttctgacatttgtctccactgggattttactaatgtaagcattaagttataaacaaaccagaaatcaactctgtcatgtgtgtgatgaaggtaatactgctttgggggcatggagagtgacttggctagtgtttatttagcattgttcaaaggtgaaaagctctgtatgtgttagatactaatgttctggtcactatagagacatacactgaagtgggaagggaaatctttaatcggatttactgtaactctgaggatgctccctcaaagacagctcaattccctgcatgtactctaagccaagcaactgtggctcatgactccatttctttggattttgatgacagaaacactttccccgagaggtggacagtctccctccagtgcccaaaaagccaatctttcatttacaaatgaatacactggcatgggctctttgacagtctttgagcttggttagtgtgaaactgtttcctaatggccaatcaactctggataaacataaaatggaatttctggacatgccccactgaggactagactttggatttctggtgagaccccaaaggctcagatatcacagaagacctagcttgaaacagagaacatgtttctctttgcacaatcatcactacaacggtagttgattggaacaagattctcaaggggcactgaggggcttccttaactggtcacaaaatttaatgaaacaagtgatgacttgtaggccaacaaaaaaatagtcaggacagcagacttgattgccctgaagaatgctaccccttcttgcaaaccaagcatgctgggactgtacagtgtgtgtgtgttaaagattcttgccctctgaagccatgataactttagaaaagatatagatgttgcaggagtaatttctttgtccttttttttttttttttcagatggagtctcgctctgccacccaggctggagtgcagtggcgccatcttggctcactgcaacctcagcctcccaagtagctgggattataggcacccgccaccacacccagctaatttttgtatttttagtagaaagagggtttaaccatgctggccaggctgatcttgaattcctgacctcaagtgatctgctagcttcagcctcccaaagtgctgggataacaggtgtgaaccaccacgcccgaccagaagttatttcttgacggattattattattttttccttttatatagaatggttagaagacaatcacgtagaaagagaacgatggtagcaagatagtataatttgaatccggatcacatacctacattagaaagtcctcctctctgagtaattttctctatggctgtcttcagatctcgagaattcgtgtgtgtcttgaggttaaagtgagtagcag

SEQ ID NO: 549 - DNA, 12503 bp, Homo sapiens
  SITE (270): n equals a,t,g, or c
  SITE (271): n equals a,t,g, or c
  SITE (276): n equals a,t,g, or c
  SITE (291): n equals a,t,g, or c
  SITE (294): n equals a,t,g, or c
  SITE (295): n equals a,t,g, or c
  SITE (314): n equals a,t,g, or c
  SITE (321): n equals a,t,g, or c
  SITE (322): n equals a,t,g, or c
  SITE (326): n equals a,t,g, or c
  SITE (327): n equals a,t,g, or c
  SITE (328): n equals a,t,g, or c
  SITE (329): n equals a,t,g, or c
  SITE (355): n equals a,t,g, or c
  SITE (356): n equals a,t,g, or c
  SITE (817): n equals a,t,g, or c
  SITE (873): n equals a,t,g, or c
  SITE (1090): n equals a,t,g, or c
  SITE (1296): n equals a,t,g, or c
  SITE (1564): n equals a,t,g, or c
  SITE (1583): n equals a,t,g, or c
  SITE (1595): n equals a,t,g, or c
  SITE (1748): n equals a,t,g, or c
  SITE (1903): n equals a,t,g, or c
  SITE (1932): n equals a,t,g, or c
  SITE (3874): n equals a,t,g, or c
  SITE (4770): n equals a,t,g, or c
  SITE (6266): n equals a,t,g, or c
  SITE (6523): n equals a,t,g, or c
  SITE (7718): n equals a,t,g, or c
  SITE (8296): n equals a,t,g, or c
  SITE (8679): n equals a,t,g, or c
  SITE (8848): n equals a,t,g, or c
  SITE (9556): n equals a,t,g, or c
  SITE (10593): n equals a,t,g, or c
  SITE (10595): n equals a,t,g, or c
  SITE (10748): n equals a,t,g, or c
  SITE (10755): n equals a,t,g, or c
  SITE (10932): n equals a,t,g, or c
  SITE (10951): n equals a,t,g, or c
  SITE (12273): n equals a,t,g, or c
  SITE (12455): n equals a,t,g, or c
ttctttttttttttttttttttttttttttttttgagacggagtctcgctctgtcacccaggctggagtgcagtggcgcgatcttggctcactgcaagctctgcctcccgggttcaagcgattctcctgcctcagcctccagagtagctgggattacaggcacccaccaccacgcccagctaattttgtatttttaatgaagatggggtttctccatgttggtcaggctgctctcaagctcccgacctcaggtgatctgcccacgtcggnncgccntcccgaagtgctggngannttacaggcgtgagccactngcgcccnnggcnnnnctcattatttatttatttatttattnntttttgagacagggtctcgctctgttgcccaggctggagtgcagtggcacgatctcgtctcactgcaaactctgccttctgggttcaagcgattctcatgcctcagcctcctgagtagctgggactacaggtgtatgccacagaccttggcccaagccatagcatatgaatttgtaaaatctaaccatgtcgcacttaaaagtgtcttcctcctcattaagtagttcctgatgtagttcccccgattacagctgccttgctctaacgccaattggatcagcacgactcagtaagtcaataacaaacaggcttcccagtgacgatggaagtggggtcttatttgcaattttaaaaagtataaaaagcaggggcttttatataatatgaaaacttggacacaactcctgagcacaacaggaaaataagtaagcaaacttacctgtgtgttttccctcaaaggncaaattccactgaaacaacccaagagttacaaggaaggggaaaagcctgtggcagncattggaaaacagagaacaatatcatcaagtgaccgatagcacagacggatttctgaacgaaatgaagatgatggaatcagatcaacagggaagcagatggtgcccaacagcctagtgatgtaacactggcaaggtacggggctccatgagaggtgaatgggctgctccaaccaagccctagaaactacccaaaggcagagcagccggggctgggantaacaggcaggtgtgaggcaggcagaggagggccagaaaagccctcccattacaaccaggtacacggtttacttctcagagctctccacgtcctagtcaaagaagtaagggtagccaaaagtagaaatatcagaaagactccaaattgccattatttgcaaataaaattgtctccttagaaaaatcccaaagaatcaactaaagangtgatttaaaaacagtttggccgggcccggatttggctcatgcctgtaatcccagcactttgtgagcctgaggcgggtggatcacctgaggtcaggagttcgagaccagcctaacatggtgaaaccccatctctactaaaagtgcaaaaattagctgggcatggtggtgggtccctgtagtcccagctactcgggagggtgaggcaggagaattgctggaacccgggaggcggaggttgcagtgagcagagatcacaccactgcactnccagcgtgggcgacagagntgagactccgtnctccaaaaaaacaaaaccacagttcagtaaaatggccagataagataaacattcaaaaccaccaactgttctaagtgcaaactctaaacagtcgggggaaaaaacggtattttcacacagtagcaacaaaagcataataacaggtcaggcgcnagtggctcacgccccaacactttcagaggctaaggcaggaggatcacttgaagccaggagtttgaaatcagcttggtcaacatagctagatcccatctctacaaaagaaaaattaaaaaatgagccgggcatagtggcttgcacctgtagtcccnagctacgcaggaggctgaggcagaggacnggcttgaacccaaaagttcaaggctgcagcaacctatgactgcatcactgccctccagcctgggcaacacagtgagacccccccaaaataaataaacaaataaaaatgcagctggaagtaagtctttataaattaagacccctttgaagaaaattataaaaccttgctgcagagtgtttttaaaaatctcagcattgccaggcgcggtggctcatgcctgtaatcccagcactttgggaggctgaggcaggtggatcacctgaagtcaggagtttgagaccagcctgaccaacatggagaaaccccatctctactaaaaatacaaaattagctgggcgtggtggcgcatgcctgtaatcccagttactcaggaggctgaggcaggagaatcgcttgaacccgggaggcggaggttgcggtgagccaagatcacaccattgcacaccagtctgggcagtaagagcaaaactctgtctcaaaaaaaaaaaaataaagtaaaataaaaattaaaaaataaatcgcagcaagcggagtagaaaggaaatctataaagatatcaatgctcccaaacttaacctgtatgtttaaattaaaaccccaaagagtttcttctggaaatctgaaaaattgatacttaagaattatctgaaaggatacaatcgataatttttttttgagacagtcttgctcttttgcccaggctggagtgcaatggcgtgatcttggctcactgcaagctctgcctcccaggttcacgccattctcctgcctcagcctcccgagtagctgggactacaggcacctgccaccgcacccggctaattttttttatttttagtagagacggggtttcaccgtgttagccaggatggtctccatctcctgacctcgtgatccacctgcctcagcctctcagagtgctgggattacaggcgtgagccaccgcaccccgcctattttgtttttttctttttgagatggagtctcactctgttgctaggctggagtgcagtggcacgatctcggctcactgcaacctccgcctcccaggttcaaatgattctcctgcctcagcctcctgagtagctgggactacaggcacccgccaccatgcccagctaatttttgtatttttagtagagatggggtttcaccatgttggctaggatagtctcgatctcttgacctcgtgatctgcctgcctcagcctcccaaagtgctgggattacaggcgtgagccatcatgcccggccacaatctatcattttttaaaaataagaatgaaaacttgccctatcaggcaaaatgtactgcaaatcctaagtaatactgtatttccagattaaaggcactactgcaaagaaaagtgtaaatttatttaataccaaatgtttcctaagtttactttttgcacaatgcacagacacttttgggacaatgtatggttaaaaactaatattctaccaacagctccatgctgctctagatcatcctgaaggaaaaagtaatgcaaaggatgctgggtctccaagtcccaggactggctgatagcctctcccagtggatagcaggtcctaattctcttcttcgagcagattctctgatttcagctgggccttcctgatgctctccaagttcagttgttgatattttcttttaaaaaagccacactgaaacaaaggaaggaaaagtccagttacaggccaaagatagccatctgtttcagaaaaccggcattctggctgttgcctaaatagcccctatattcctctgcttctcatacttactactcccttctcctaacttactctgaatctctcctggagagtccaatccttcaagacctctggtgctcatccctcaatcagaactgactccaccttcctctgaaccctgctctcccgagcagctgaacctttttaacttattttgcaaagcatgnataatttcggctgtactggatctaatcttatttatgcaaaaatactcagtatagcctatgatgctgaagacagaaggagatcaagtacagcttcctacatcaagctcatcatctagtaggaaaaagagataattacaacacagtgtgatgactgccatttggaagggtttctagaagggagctcacagcaaacacacagaagccagcacagaggactcaggagtctctagaccgctttcagggaagacagtgagtgaagtgagcagtcatggagggcattcctgacaagaaaagcagcctacgcgtacgcagaggcacgaacctatttagggaatagtttgacttgttgggagaaaaaagcaaggtcaggtgcttatgcctgtaaccccaccacttcgggaggccaagatgagaagatggctcgagccccggagtttgagaccagcctgggcaatatagggagacctcatctccacaaaattaaaattaaaaaattagctgggtgtggtggcatgcacctgagtaacagtcccagttactcaggagactaagatgggaggatcacctgagcctaggagtacgaggctgcagtgagcccttaactgtgccactgagctccagcttgggggacaaagaccctggtgtttatttttaaaaaagaggctgggagtggtggttcatgactgtaatcccagaactttgggaggccgaggcgggaggatcacaaggtcaggagtttgagaccagcctggccaatatggtgaaaccccgtctctactaaaaatacaaaacaattagccaggcatggtggcacattcctgtaatcccagctactcaggaggctgaggcaggagaatctcttgaacccggggtcagggtggggggaagggaaggtntgcagtgagccgagatcgcaccaccgcactcaagcctgggcgaaagagcggaactccgtctcaaaaaaaaaaaagaaaaaaaagcaacacttaagggcagagacgggtagcggacagagaggagaggatcttaaatagcagtagaagagtttgcacattaagacaggggaaggcaaggaaaagatttcaacaggggaacaacagtcacatctgttttaacgccttaccgttaaggcctcttccaagtaagttataaatgctggcctagggttgaccttccaggccctattgaactcacaggtaaccgaacataacagtattaagttctgggccttgagaatagggaggtaccaaagaaatatatataaaatcactctttataactcagagttttctcttttcagacagatactgttttactcatttgtctaaatgggggtgtgcagttgaaggaggagaaaaaagtggccacgaggccagggcagctgctctaagtcagaggttggctgtcctaaggagttctgtgcccaaaactagagcccagtcttccctcactgtgatgccatgagtagaactgaccttgaacaggatgaccagaatcacgatcaacaccagaagtccaccaacgctgcctttaatgatgataggcaaagaatggtacttctcatctttcaggaagacgacagtgatctagacaagacaaagagatcgcccaataaatcaggtgaagcaaacaaggaaaaaatcctacatgttattttaaggagcaaaatacgaggacttggcaacaacccgtgtattgatcaaagctgatgacagtaaagcaaaaagctagatattccctgatgcagcattttagatcatctaaaactatccaatcacccaaatacttcgtaagaaactattctggccccttatctagaagggctaggtctgtcaggagattatgaccttctgttaaagatgctctgacagcttgaaagagggtcccacggaatccggtctcaacacaggactgtgaggctgtcacgccgctacactgctctatgtccctgagccccgtgcctatgctctttaaaatgatgacttcctttaaatgatctccaagtcctttccaactccgttctgacggctctttttgatcttgcacagatccctaaaggctttggtaatacactttccccacataaaatatgacaaaagtactggtcttcccctcaccagactaaaaagtgtgtattacctaagggacataataaatgcaaattatatccatgtgtactacttgcagagctcagctattagaagtcatccgcaggttttgttttccaaaggctctcccaatttcgggagtctaatctctcttctggcagggctcagctagaaagttcaggagatgtccttcctgagacccaggtatggcccttccaagttgtggccagaggaagttcccaggacttaggtggggccagagagccaacaagacttctctgccntgcccagagcaacccttcacgtgtatgtttaagcaccaaggtcaggggtgctttggagaggtttctgtacggggtgaagggctggacaaacttacctttaaggcctcttccaattaagttataaatgctggttgacctaaagttgaccttccagtcctatttagctcataggtagctgaactaaataggagtgaagtcctaggctttgagaatagggaggtaccatagcaacaaagagggaggaagaacagaaagangggctggaatattctacaggagaaggagggggactcaagaccctgggtttgggaagtgaaaggaagtcccaaggtgactcgggaaacaggccagatgtgagtagaagaaatgtccctatttctcaaagccacctccctttatcttcttctaaacccacagattcccaaaagtgccccaaagatgcccaagtagaggttaagggagaagcaaggcaccgggtactactgtttgcagcaaacacggatgctggcctgcccaggggcccctctctccttttggattttattcaggaatcatcgttggtctcaggtgatcatgacacagctattctcctttgccagtgactgacatgagattcagatctcactaataagatgtaagaggatgtctcctgggagcttttggaaactgtttcatccctgaaaagggaaggcacatgaagaaaaatccaacatccttttgctactgacttcttgcttcctgttttgtatcctgccatgtgaaaatacagcatttggagatgtggcaactttgtgctggccatgaaggaatgcgtcccccacacggcagagtacaaggaccaaagaagccaggccatcgccccaggccggcctccctcactggataaacagcatatgcccttatgctgcatgagctggattttccctttcttgtggctgaaatgcatttggatacagtttgtttatactcatagagtcactgtaagtcaggggcttattgtcaggaactacttaacactttgcttaggatattggatttaaagaaaggaattttggggaatccatgctatagaaataaaagtatcagtaagtaagagggggaaacatacaaatttaaaatgtgcacataagaaacttaatagtaactcctccctgctgggggcatgggaagggagaaatgaaggaacaattatttttcatttggtaccattctctgtatggcttggattttcttgctattatttttatttgttaaaatctgggcagtgcaataatggggcacttctatttcttccgttttctgtattttccatttccctctattttctgtattagaaatacactacttagccggacatggtggctcatgcctgtaatcccagcactttgggaggtcaaggcgggcagatcacctgaggtcagaagttcgagaccagcctggccaacatggtgnaaatcctgtctctatttaaaaaaaataaataaattagccaggcatggtggtgggcacctgtaatcccagctactcgggaggctgaggaagaagaatcacttgaactggggaggtggaggttgcagtgagccgagatggcaccaacggactccagcctgggtgacacagtgagattcttcctcaaaaaaaaaaaaaaaaaagaaagaaaagaaaagaaaaagaaatacactacttaaaaataaaaggaaatgttatattggcatgtctagagaattgctcctttctcctcctccagggaggaaaacagaggaccttatatttagcaatccagcatcactctcctgacattccctctagtagagaatcatgcctaactaaagagctcagagctcacagatagatcacctctgaagccatgtccaggcaagggtcaacaagaatgaaaacacagggtaacacacaaagcattcagtccacaaatcacaggcatcagtctgacttctagtcatacttttgcaaaaagaattccaagagttccagtatctagtctaaatcttataaaagatttatgcattccntgagtactgtttaatactataactaaacactgatacagcacactaagacagttactggatacaaaaaacaatttctcacttaggtaattcattttttatttatttatttattttttgagactgagtctcactctatcactgaggctggagtggagtggtgtgatctcggctcactgcaacctctgcctcccagattcaagcgattctcgtgcctcagcctcccaagtaggtgggattacaggcacccaccatcatgtccggctaatttttgtatttttggtagacagggtttctccatgttggccaggcttgtgttgaacttctgacctcaggtgatccacctgtctcggcctcccaaagtgctaggattacaggcgtgagcncacctgcgcccagctgcgaaatttttttttttaatcaatccattttcaaatcaaagtatatactgcagattccagcctagttatttcaactcagaactcctcagcttaggcctcttaattgccttatttcataagaagctgactcactcaaaggtcacaaaggcagcgnatggcagagccaagatcagaagtgttaaggctgaaaacaggaagagggcaacagaatgtctgtggaggtgctcaaaggttaggcacaattttccttgggcactactcagaagccagccaggaattaccttagttctgtggttctctgcattcagtccctcatatagagatttgttgaaagatatttcaccaaggatctgcagttcagttacatcttttagtaactagaagatggggaaaggaatgagggaaacaaaacatattttagacatgaactcactgtgtttgaacagccttcaccacctttccctttaaaggtattcctgggcttagttaatggccctaacgtacacaacactacataaagttacccaaacaagacatctgcagttattcttcaacttcctttttttttttttttgagatggagtttcgctctttcgcccaggctggagtgaagtggtgcgatctcggctcactgcaacctccaccccgtcaggttcaagcgattctcctgccttagcctcccgagtagctggaattatgggcatgtgccaccatgccaggctaatttttgtatttttagtagagatggggttttgccatgttggccaggcttgtctcgaactcctgacctcagatgatctacccacctcggcctcccaaagtgctgggattacaggcgtgagctgccgcgcctggccttttncttcaacttcttttcccttgtgccatccaaagtcagttcttgactgactgacttatttttgagacaggatctcgctctgtcacccatgctggagtgcaatggcatgatcatgggtcactatagcctcaaccttccaggctcaagtgatcctcccacctcagtctcctgagtagctgagaccacaggtgcaccccaccacactgggctaatttttgtattttttgtagagatggggttttaccatgttgcccaggctggtctcaaactcctgggctcaagcaatccacccaccttagcctcccacagtgctgagattacaggcatgagccaccacacccagcttattcattttatttaacgtaagagatttttcctttttttttttttttttttttttttttttgagacaaggtctcactctgttactcgggccggaatggagtggctcaatcatagctcactgaagcttcaaattcctgggctcaaacgatactcctgcctcagcctcccaagtagctgggactacaggcatgagccaccatgcgtggctaatttatgtatttatttatttttaagaaatggggtttcactatgctgcccaggctgatcttgaactcctggcctcaagcaatcctcccgcctcagcctcccaaagtgttgggatgacagatgtgagccaccacactcacaattctttttttttaaattatttcttgtatctgtccctttcttttccacccccattgctacttcttcagttgagacctcacaaatgtcacctggatcactgtaaaacattaaacttgatcacttgatcactagttcccactttagaataagtgatcagggaaggcctctctaagaaaataacacgtgtggccgggtgtggtggctcatgcctgtaatcccagcacttcgggaggctgaggtgggtagatcatctgaggtcaggagttcaagaccagcctgaccaacacgatgaaaccccatctctactaaaaatacaaaattagccgggcgtggtggctcacgcctgntnaatcccagcactttgggaggccaaggagggcggatcacctgaggtcaggagttcaagaccagcctcaccaacatggagaaaccccatctctactaaaaatacaaaattagccgggtatggtggcgcatacctgtaatcccagctacttggganggctganggcaggagaatcgcttgaacccgggaggcggaggttgcagtgagccgagatcgtgccattgcacaacaagagcgaaactccgtcttgaaagaaagaaaagaaaagaaaagaacacctaggtcgggtgcggtggctcacgcctgtaatcccagcactttgggaggctgaggcgggcgnatcacctgaggtcaggagnttcgagaccagcctggccaacatggtgaaaccccctctctactaaaaatacaaaaattagctgggcgtggtcgccggcgcctgtaatcccagctactcgggaggctgaggcaggagaatcacttgaacccgggaggcggaggttgcagtgagtagagatcgtgccactgcactccagcccgggtgacagagcaagactccatctaaaaaaaaaaaaaaaaaaaagaaaagaacacctgagctaaatttaagaagaaaccacctacgtcaggacctagaggaagagcagtgtcaagcaaaggaacagcaagtacaaagtcttgtggccagaataatgctgtactggcgagctagaagaataggacagaataacccgattataaaaggggcagtgggagagaaaggcgagtactaggagatgaagttgaagaattaagcagagaccagatcaagtactgccttgctctggccatgaaaaaagtatggattttagtctaagtgtgctcaagcatcagttttgtttgtttgttatttttaataagcaggggaatggcacaatctaatgtctgctcttagaagacggatagctgttacgtgggaattatttgtaaagaatgtgggaaaagcagaggcaagaaaggcaggccgaaggttattgcaacagccctggcaagaaagggtagcttgaattacaacggcagtggaaatggagagaagtgaatgggtttaggatatattttggccctgaaatggcagggcttgctgctggaatagacgtggggatgtaggaaagaggagtcacaggtaatccctcgagttccttgtactgtaactggagtatatctccctcctgagggtagctaaggaacgggttgggacagagggttggttttttgcaccaaaagatctattttggacatggacatgttatgcaaagatgctattatctcttctaggggcgatgcccgtgagcaactggataatcaaatctggagcatttcagtctcaaacacctcctcagagtgatcccaggagatctctgcagccacggtgacattttctttatctgaagcgatgacacagctcactgaatgccattcttccacatgctggaaaagcgaggtctagtgaacacaattcctttccgtgcggaaagtctgaaatctttttaacacttcggacacagagcatcgtaaggtcccagaatagagggtgtgagcaatttcagcgctcacctcggcccaagcaaagctccagcgggagcaattgagacccagggacgaagctagggagggcctggcagcccccggcactggccggcanggggtaatctaggaaaaacagtctcctggcctctcgttacccgcttcaggccctccgccctcccctggcctctcgggacggccgcgcttacctgaaccgaactgtacgcacaagcgcgctcctgactccaggtgcacaccgtggaggcctgaaacgagagccatgaccgcgacgcgctgaancaaaccaagccgccagttttccgtcccgtcccggccccggccctggcg

SEQ ID NO: 550 - DNA, 571 bp, Homo sapiens
  SITE (30): n equals a,t,g, or c
  SITE (111): n equals a,t,g, or c
  SITE (174): n equals a,t,g, or c
ctcttggcgggtgccggccatggcggcttncgctcccgggacctgggagccggcttttccgcacatatggggctgcggacggcaggagacagcggcggccgggccgggaangccgcgcagtggttcccgccgcaggaccggaggcgtttcttcaacagcagcggcagcagcgancgccagcatcggcgacccctcgcagtccgacgatcctgacgatcccgacgaccccgacttccccggcagcccggtgaggcggcggcggaggcgtcccggcggccgagtgcccaaggaccggcccagcctgaccgtgaccccaaagcgctggaagctgcgagctcgcccaagcctaaccgtgaccccaagacgcctggggctgcgagctcggcccccgcagaagtgcagcacaccctgcggcccgctccgacttccgcccttccccagccgcgactccggccgcctcagcccggacctcagcgtgtgcggccagcccagggacggcgacgagctgggcatcagtgcctccctgttcagctctctggcctcgccctgccccgggtccccaacgccaagg

SEQ ID NO: 551 - DNA, 8269 bp, Homo sapiens
cagaccccaatatttggagcagaaccccaagatttgacatctaaaacctcaagcctggagctgaactctgaattctgggcctgggaccttgaaatctgggactggatttccagtactgtaccctggaacccactcttggggacctgaaccctgggattcaggcctcaaattccaagatctggactgtgggattccaaggggcctgaacccgagtttgggcctgaagtccttgctgcagacctgagtgcttaaatctggggcttgagacctcccaatcttgactcagcaccccaatatctgaatgcagaaccccgggatcggatctcagactctaaaccccaccgtttggctgcttagcatcccaagactggacctgggagaccctgaccctgaacaacccaaactggacccgtaaaactggaccctagaggcccaatatttaggggtctggaaccccgagtattaaggtctggagactccgttgccacagatttgagccgagtcaggacacagtccctctacagaagccttggggacaggaaaagcatgaccagatgctccctccagagccctgacctctgactcccctggagctaggactctgctccctggggctgcttctagctcaggtaaggctgctgaaacctcaaggtggggacgggctgggaggagcattgtggctgcgggttacggtaccaggtaccctttgacactcttggggtttctccagaaaaaaagacattcccccatgggtctgccttcagctcctgctctgctccaaacactctctggacactggccatccttgcccctctctgaccttccctgcctcagttgatgggacctccaggtctctgacccctgcaacccttacagcctttcgctgtctatccggtccgaccgtctccgccacctctcttgtccaccactcctctctctgggctcctttctccacctgtcctctcaatggccatctctgttccctttttctctctctgatcatctttgtgacacccctgtccacaggtcctctctccagtcgcctctgcctgctgcttctcagtgaccatcgctgacatctgtgtccactgtgcctctctctaatcatcattcaccagctctcttgctccttctccacccctgaatctaagcctaggtctgtgaccgtccccatccatctttgacattgctgtccaccactcttctctccagcagcctctgtccatctctcctctctagcttcctctggccacctttccctttctctggccatctctcccactgctcttgccctcctcccacccctgaccctaactcccagtctgcaactgtctgaccatctctggccacctctcctctctctctcactcactgatgccctctgatcatctctggccacctcttctctctctctcactcattgatgccctcttgatcatctctggccacctcttctctctttctcactcactgatgccctcttgatcatctctgcccacctcttttctctcgctcgctgatgccctctgatcatctctggccacctcttctctctctctcactcactgatgccctctgataatctctggccacctctcctctctcacttgctgatgccctctgatcatctcgaacatctctgctgcctttcctctctccgatgacctctccccgcaccatcctcctgagcagctgtcctgggctcccactgactctgccatgtctgtccttttcctcctctctgaccaccttgctggctttgggccgtttctgaccacgtgtctctgacatggtcatctcccccagatctgagcccaacccatgccctcccttctctttgtccactgctcatcttcctgaccatctgtaaccccttctcttctctggtcatatctgaccacttctgatcattgttgccaccctggctgccccgtctccccatggccagcttttaccatctctgaccacgtctaaagccctctggttttcctgccactcacccagaccagctgtcatttctctgaccatttctttacttttttcttttggagagacagagtcacgctctgttgcccaggctggagtgtggtggcgcaatcatagctcactgcagcctcaaattcttgggctcaaattgatcctcccacctcagtgtcccatgtagctaggaccacaggtgggcgccaccatgcctagctaatttttaaaaatttttgtataatagatacacggtctcactttgttgcccaggctggtcttgaactcctggcctcaagccatcctcctgcctcagcctccccaaatgctgggattacatgtgtgagccaccgcgcctggccttcctctggcttttggtcacatctgacggtctttgaccagcccttctgccctcagcccactgtgaccttctctcctggtctcagaccacccccagcccctgcagaacccctcttctgccctcacgcctcccctcttctccgcaggacacccctgcccgcgatggccatcctcccgttgctcctgtgcctgctgccgctggcccctgcctcatccccaccccagtcagccacacccagcccatgtccccgccgctgccgctgccagacacagtcgctgcccctaagcgtgctgtgcccaggggcaggcctcctgttcgtgccaccctcgctggaccgccgggcagccgagctgcggctggcagacaacttcatcgcctccgtgcgccgccgcgacctggccaacatgacaggcctgctgcatctgagcctgtcgcggaacaccatccgccacgtggctgccggcgccttcgccgacctgcgggccctgcgtgccctgcacctggatggcaaccggctgacctcactgggcgagggccagctgcgcggcctggtcaacttgcgccacctcatcctcagcaacaaccagctggcagcgctggcggccggcgccctggatgattgtgccgagacactggaggacctcgacctctcctacaacaacctcgagcagctgccctgggaggccctgggccgcctgggcaacgtcaacacgttgggcctcgaccacaacctgctggcttctgtgcccgccggcgctttttcccgcctgcacaagctggcccggctggacatgacctccaaccgcctgaccacaatcccacccgacccactcttctcccgcctgcccctgctcgccaggccccggggctcgcccgcctctgccctggtgctggcctttggcgggaaccccctgcactgcaactgcgagctggtgtggctgcgtcgcctggcgcgggaggacgacctcgaggcctgcgcgtccccacctgctctgggcggccgctacttctgggcggtgggcgaggaggagtttgtctgcgagccgcccgtggtgactcaccgctcaccacctctggctgtgcccgcaggtcggccggctgccctgcgctgccgggcagtgggggacccagagccccgtgtgcgttgggtgtcaccccagggccggctgctaggcaactcaagccgtgcccgcgccttccccaatgggacgctggagctgctggtcaccgagccgggtgatggtggcatcttcacctgcattgcggccaatgcagctggcgaggccacagctgctgtggagctgactgtgggtcccccaccacctcctcagctagccaacagcaccagctgtgaccccccgcgggacggggatcctgatgctctcaccccaccctccgctgcctctgcttctgccaaggtggccgacactgggccccctaccgaccgtggcgtccaggtgactgagcacggggccacagctgctcttgtccagtggccggatcagcggcctatcccgggcatccgcatgtaccagatccagtacaacagctcggctgatgacatcctcgtctacaggtgcagggtccaggcactggggtagcttgggtgggggagtgaggcaaggggagggttgagggtacacctactaataccctacaccgaagcacaactgataagtgatgctggaaggttccaaaagaaatcagagagcaaaagtaaaagaaatcaggcagcaaggataacaagactctggcagaaagggtcaatgaaatctgacagcagtgataaaaagaagtcagacaagaaggacgaagtaaatgagacagcaaatgttaaaatatatcaggctacagggctaaaaaagatcaagcaataaggataaacgaaatcaggctgcatgagtaaaaagaaattaggcagcaagaataaatagtagtagcaaacataaaaaggaaaccaggcagcgggaggagaaagtaatcagggcagaagaataaaatgttaatgggcaagggtgggtggggaagataaggggataaaaataaatttaagttgtaaagataaagagagaaacaccaggttttccagatgacaggactagatactagctgggctgcaggaagaaaaggagatcaaacaggaaagcacagggagcccagaaacaatgaaataagcagctctgttagaaaaagaaatcagaccagaggttagaaggaaattgcagggaggaggttcgatagagactgggcttcggtgtgtgtggtgtgaactattccatgtttcaagttctaatatagtgacatccagatttttttttttttgagacagggtctcactttgtcgcccaggctggagtgcagtggtgcaatctcggctcactacaacctccacttcccgggttgaagcgattcttgtgcctcagcctctcgagtagctgggattacagacgtgcaccagcacgcccagctaatgtttgcattttatttttagtggagacggggttttgccatgttggccaggctggtctagaagtcctgacctcaggtgatccacctgcctcagcctcccaaagtgctgggattacaggcgtgaaccaccacacccagtgtagattttttcttttctttttttttttgagacggagtctcactctgttgcccaggctggagtgcagtggcacaatcttgactcactgcaagctccgcctcccaggttcatgccattctcctgcctcagcctcccgagtagctgggactacaggcgcccgtcaccatgcccggctaattttttgtatttctagtagagatggggtttcaccatgttagccaggatggtctcgatctcctgacatcgtgatccacccgcctcggcctcccaaagtgctaggattacaggcctgagccaccgcgcccgacagattttttattttctaaatcaaatcaaacctagttcaagttccttttgccaggtaaacagaaatatccagtttgccacacttgtgggggattctcttctctctcctgttgttgcaaacacagaacctggggtttacacactccaagaggtggctcagtccaacttgttcccccaagctggagagcactcagcacatctgcagtgaccgcatgtggtcagcagtggtggctgctgacctaggtgctgttgacacctcttaccaaagtccaaccttgcatggatggactgcggctgtgggtgagtccctgtcctcacggccaggctgggccaagggtgcagccccaaggctgactgtaaagactggacctccccagggttgaggactgttccttggggacctagtagtacctggatgtcctttccctcccttggggccaacacctcaagaaaaggccacttgatttccatttcagtcctggcaacccactgagctcattctactccctttctcagacatgactcggaagattgcacggaagtcctgcccctgaaaatcacacaagtcggccaggcgcggtggcttaacccctataatcccagcactttgggaggccgaggcaggtggatcaccaggtcaggagtttgagaccatcctggctaacacggtgaaacctcgtctctactaaaaatacaaaaaattagctgagtgtggtggcacgcgcctgtagtcccagctactcaggaggctgaggcaggagaattgcttgaacctgggaggcggaggttgcagtgagccgaggctgtgccactgcactccagcctgggtgacagagtgagactccgtctcaaaaaaaaaaaaaaaaagtcacacaagtcctggccaccttgccaggtggggaatgggatgaatgctgtcctagacagtcaccctgccccaggcggccacggagttccctgtacctctctcattagaatagcctaggaataaaacaggtgataagtcaactctccaacagggtgcccaactacaaaagaaactatagtgaaattgggtggtaaggattaaaaggaaacaagaaagaaaaagataaatagaaaccagccaacagagataaaagagaagcaggtgacagagccggaaagaaataaggcaacagggagaaaaagaaagcagtagtgacggaggcacattagtttaatgaaaagggaatcagacgacaggactcattggaaaacaggctatcaatacagtcatcataataaggcaatagggctagggggacatttattggcaggttacaaggaaatcgggcaacaggggtacagggagatcaggtggtttgattggagagaatcctagctgtacactagaggaaaatcaggcagctggaaaagggaaatttggcataggctgcaggaaataggggaaccagagggaaattggcaagcgtctggaggagactgggaggtaaaatgtgggggaaattggatgggggtggctagaagacaaaaggattaaattagatggaaattggacagggttagagcagaattgggtggtgaactggagagatgactggcagtgggaccagagtgaaatcaggcagaggattggggcaaaattgggcagggaggctagagcggagctgggctgcaggctggagggaaattgagtgggcagtgcaaaagggaaattgggcagttgggtataaaatgaaaccggcaaggtgtggtggctcacgcctgtaatcccaacacttaaggaggccaaggcaggaggctggactgccttgaggccaggagtttgagaccagcctgggcaatatagcaagagcctgtctctacaaaaaatttaaaaattagctgggcatggtagtgcacacctgtagttcctgctactcaggaggctgaggccggaggatggcttgagtccaggagtcagaggctgcagtgagctgtgatcatgccactgcactccagcttgggcaacagagcaagaccctgtctataagaaaacagaaagaaagaaagaaaagaaacaggatggattggaagaactcacgtggtgagctgttagagaaattgggtggtgggactagagtgaaaatgggcagcaggctatgaggacgtgtgagagggtgggctagagtgaaattggccaacagactggaggggtatcagtcaggtggctgaatgggatgtcagaccaaagggaattgggatgttggtgagagggagctcattgggtagaatgaaatgaaggagtggactggtgggaagtctagccccgcagggagtttggtgggggaagcacaggttgggggctgggcagcctgagacctgacccccacctgcctgccctgcaggatgatcccggcggagagccgctcgttcctgctgacggacctggcgtcaggccggacctacgatctgtgcgtgctcgccgtgtatgaggacagcgccacggggctcacggccacgcggcctgtgggctgcgcccgcttctccaccgaacctgcgctgcggccatgcggggcgccgcacgctcccttcctgggcggcacgatgatcatcgcgctgggcggcgtcatcgtagcctcggtactggtcttcatcttcgtgctgctaatgcgctacaaggtgcacggcggccagccccccggcaaggccaagattcccgcgcctgttagcagcgtttgctcccagaccaacggcgccctgggccccacgcccacgcccgccccgcccgccccggagcccgcggcgctcagggcccacaccgtggtccagctggactgcgagccctgggggcccggccacgaacctgtgggaccctagccaggcgcccccccctctaagggtcctctggccccacggacagcaggacccggacaccctgtgggacctggcctcaaactcaccaaatcgctcatggtttttaaaactctgatggggagggtgtcggggacaccggggcaaaacaagaaagtcctatttttccaagcttgggcgaa

SEQ ID NO: 552 - DNA, 2633 bp, Homo sapiens
ttgaaggtgtcatcatggtctatttagtattaggcacagacaaatgagtagagagtgaaacatgaccaagtctgagggtatttggaaaacaaagagtcttcctgggaaagaggcccagcaccgcacaggcacagggaatggtgactctgccttccctcgctggaaacaccaagacaggagagagaacccaaagagcttcacctttggtctcacagatcatcacgttgctgaactcgctctcccctccttcattgaagcactgcatcttaatgtcgtaggaggtctctggctgcaggtggctgatggagtgccagtacttgtcccctgggaaacagagtcagagaatggtgcatggcaatgtgtatatggttttcttgatcccaatctcatagtcagactcagctggggcagtgtgtgggggaggatgccactgactggcacaggggcggcgtgtggaggaacgctggaggaaatgttctaggtgtccacccaggttgtcccatcatcacatgggttcatgaagttgacagcttcaagggtattatgaatgagtcaatgacacggagcttagagcttcgtgtcacaccagacgcaggtttatgcttcaccagatttcaccaataccttgtcccccatgccagcggaggaaactatatcacgcagaagctataaacacagaactgtgtctcaccttccaccatatccttcttgtagtcactatcattgtcactgtctgtgggtcgataatagatataaaagccatggattggggtgttgttgttacttgctgggatgtactatagggaatggagaagaaacaagttgacaatgggcagagaaaacatcatcaaagcaaaaccactggtgtatgaaggttctaccccagtccagagtttgaatttcacttgggacccctggcaaagatttctaatgatatccctgaggttctctgaaaaatgttgtaaagattactcattattttatttagcctagaggtccctaagcttttgaagagaagaaacaaattgccatttctccaaagacttcaattgcttctgatctccctggacatgtgaggggcccctgtggctgagaaggggccctgaacagttgtgttgggatcccctgtggtgtcaggggaagggcaggaaggagggtgaggtctaccaggtcaaggcaccagaatcaacaggagaccactagagcagctccagccactaagagcctcccaaattccactgatgaagctttcaggtgccctgttcgggggagtctaatccccaggctcacagggaagggcatttaggggaggccgtcttccactgcagtccacggccaggcccgcttaccatccacttgagcatgatggtggtctcattgaccgcatccgtgaaggtgatataaggacctgccacgggcctctcgtacacgcgaccgctgtagcccgacaccacgtagggccgagagggggcgctgggctcgctctcccccagcatgttcagagcccggactcgaaacttgtaggaggtgcctggtgagagggacactcactgaactcaggagctgggaaataccttctgattctcccatggcctttcaaggcccaggacctggaggggtcttctgggcagcccttccccaaagcaagttctcaaaggcctcacaagaacacccgccactgtcagagctgagctgcaggggagatggctctggatgctcttctggagggaggcagaaggctttaggactgtggtaaacaccacagacagcaacatggaggcatgctggtgggtgggggcctgggccgagagaaggggatcccaggctcgtcatcctcctccaggcggaaaggggcagctgggggatcaggccaaggccacggtgtggccaggcccctacctttctctaggcccgtgatctccacggacagccgtgacggggggatggcgctggtggccagaatccagtctcccactttctttagcttcttgtactccacacggaaggactggattgggaacccaccattcccacggggaatccaggtcacgtacactgaggtctcggaggccgtggagatggtgggcctgtcgggagcttctggggctgggaaagaccgtatccagtgaggaaggaagcagggtgagatgacgtgaggaaggaagcagggtgagatgacgctgtatgcccactgggcctggcctgctcctgacgggcccgctcctccccacagccctccacccactggtgttcacatcagacctccccacggctgcctgggctttgagctaagaccccttatgctatccttctgcaaagccagagtgtggaggcccaaggaccacagctctggcctctgctgctctctggatgcacccagtgagcaatcccagcatcaatgccagccttttatttaaaaagctccaaactacatttcctcattgtggttaactgggagatgtcataaaaaccctggacctacagaagcaagaccccattcagccatgggaacaggcctctgaggcagttccagtcctgactgcgcgtccgtccctgctgctagcggcttacgggagaggcggccgtggtctggctggctgctgctctggggactggctccagggtcgtctctc

SEQ ID NO: 553 - DNA, 13795 bp, Homo sapiens
ccccgcacctccaagacagactcatatgaactggtgtggcggcctcggcatgagggcagtggccgggcgccaatcctctactatgtggtgaaacaccgcaaggtatggccctggtgtggggctgctgcctcccctgcacagcctttccagcaaggctgagcagagtcactgtctcttggccatctccccttgagctcctgaagcctgagccggtaatccccaccactaaacaggcccttctgtctcctccagtgtccatccctgccacctcccaggaagctggttgtaagatgggtgtgtgggaccctggaaggcccaggaaaaagccttgtgcgtgcatccagtactaagctctatgcactcaattcccagaagctcacactggcttctagtccctgaggagaccgtgaacagtctccctggtaaccatcaccctccttcttgctttcctctgtcgttagttgttgatgttacattttggttttttatgaaagtaagccgtgctgggtacatacctgcaggaaccctggcatggtaagccagctgtaatgccaggaaaacaaatatttgtgaacaagtgttttctctgtaggctgtgaaacacccgctcagttctcagaatctgtcatggcttgggttggacaagcaggcatttgagctcaaagcacatcatgttgttcagacctcagctgtttctccttgacagaaggaagtctgtccaggtgaatgcttcaggagctgtcagggagggagtctcgggctctgacaggatgcgggggcagagcccagccaggcctatgctcctggacactgtgtcctgtgaggcagggcagggtccccaggccgccactctcgctcaaggccgtgctcttacctgccgttaccccacagggatgaggacatgaaattccctgtaagaaaatgtccttgaaaatgtttttgttcactccaagtatatgccattttctttctaaggccatttgatagtagaaaactattattcttaaatggttttttaaaaattgtatgtgataaaagcatatacatgctgattttgcttataaaaatgctatgtgcacttgatggaaagcatatgaatgtggaattaaaagtctttctccactcctccccacctccacaaacaagcaagaaaacagaaccaaccctgcacagtggagagcgctagctgtgcggaagctgtttccctgccttggagccctggcccctgactccttctattctgtttttttccccttacatgctctcctagaagtccttgggtcaggacaagtccacagagaccctggggttgtcagaaagacacctaaggcagagcaccccctatgctccctctgctgcctccccagaggcagggggacggggcgagcagtttctcattagccctccacctgctggcctcttcataggcagccagcaaagcgggtgaatgagtttttaacaaaaagcagcattgttcacatgttgtagggcagggctggtcctaatcctatttccccatgtaactggacacctccatctcagagttgtagacaaagatcagggcaggccaaacgcccatggttcccaggagacaaaacccagcatgagagcaagactaatatttttcaggccaataggtggccgtgaagcagcctcgcagaagaggcagattggcaaaggccatgccgtggtgatccggaaatgccaggctcaggccgcattcaccccctcagtgtgtgtgacagtgactaattacccttctatttcttattttcatttctgggcccagtggaagtgtgaggccagtgctgggagggcagggtacatggggcgcaggggaagtgagagtccggacaggcccctgctgcgtctggcttctctcaggctccagcctggggtctcctcagcctggggttgccaaggcagaagttctggcttgaaagcagttcctctcttacggaactaacaagtcttaaagatcacccgagaaagaatttgaaatcgaaagtcagcattcgggctgtgttttttcatcccccttctcttgctggggattgggaatcattcagctaattttcactgtttcacatccatgaagcaagtttcatttcctggtgcatctgcagaccctgggctactgtgtttgggtttccagcaccactggggagtctcagtttgtaaaaacgtctccccttggaacaaatcctggaagcctgacaatgagcccagaccattcctgtgccttgaatggtaggttttgttcgactttggaatattctgctcagagagaagagcttttccttacagctgttttcttccttcagcaaaccacaacttgaggctccagcaggttctctggggtgtagagttggcagtaaagtctgttgtcccgaaaggtggcgcggcaaagatgagcagcctctcagcatcacctgttggggagcctggagctcccttactttttcctttaaagagctaggaatttgaagctattaaagattaatccatcacagtcacaattcatccacagtttttaagttctgagcaaggactgaaggcaggagcggaaacaaagaggattgaaatgatagaaactgcactgggctgaggatgtggagaggggtctagagaggccaggcatttgctgggcatctactgtgcaccaagctcactgtggggcactttatacaacttctctcatttaatcttcagaataacctgagagagtttatttgcctcattggtgaaatgcagagctgaagggtcagagagttaggggacttgctctgagttacacaaccgggatttgaacccaggactttggatcccagactcttcttcccaggatagggtgcaatgatgggcatgctctttggagtcaagtcaccgttttggtgctcactagccgtgtggccttgagcaaattgctcatttctctaaaccttagtctccctatttgtgaagtggaaacaatattaacaccaatcttttgggctattttgaggaaaaggaagtagcacctataaactgcttagttccatgcatagcacagagcaagtgcttagcgaatgttgctattttaatgggtgctgatactttcgttacctttctcatcattgtgtctcattagaatataagcagagggaactgcatttggtttacatacagaaggagaaagaaaacaaaacatggagattctttgaaatacagggagagaaggtctttggaggagttctcagcaatatcagtcaggctgtctgacttcccccactgaggtttctttgatgagatcattagacgagggatcagggagcctgacttgaatgtcccagtgaggttggtgtcccatagccaggggggccagtccgaggctgtgccaccctaaccccaacctggcttatcgtccttccccttctcctgccctcttgggctcagcgctgctttctttgtaaaccatagcccactcgtagcccgaggctgagatgccggtctttataccagctaccttctccagcaggtcacaaattcctctgacgattggaccatctctggcattccagccaaccagcaccgcctgaccctcaccagacttgaccccgggagcttgtatgaagtggagatggcagcttacaactgtgcgggagagggccagacagccatggtcaccttccgaactggtgagagtcaaacattgccccttgcttagggtttccgtgggtctaagcaagttccactggcccaggtgagaattcctgctcaccttgccccagctgttcaccttgaacttcatctttccttccagctactgcctccttgtggtttgtgtgctaggctgaggtcccagctctcatcaggagagtagccagccggcctctctggcaccccttcatccctctctcacacaggggccagcaatagtaccacaacagaaccagtctcggccgaggctgagcccacaccctcagtgccccggatgcttatttgcatcactttgtcatgccgcttagcagagtctcaggcaaaaaggactctgtgggagggagatctcatgcctgcttcctcccttgctgactacaacccatttccacccaggacggcggcccaaacccgagatcatggccagcaaagagcagcagatccagagagacgaccctggagccagtccccagagcagcagccagccagaccacggccgcctctcccgtaagccgctagcagcagggacggacgcgcagtcaggactggaactgcctcagaggcctgttcccatggctgaatggggtcttgcttctgtaggtccagggtttttatgacatctcccagttaaccacaatgaggaaatgtagtttggagctttttaaataaaaggctggcattgatgctgggattgctcactgggtgcatccagagagcagcagagggccagagctgtggtccttgggcctccacactctggctttgcagaaggatagcataaggggtcttagctcaaagcccaggcagccgtggggaggtctgatgtgaacaccagtgggtggagggctgtggggaggagcgggcccgtcaggagcaggccaggcccagtgggcatacagcgtcatctcaccctgcttccttcctcacgtcatctcaccctgcttccttcctcactggatacggtctttcccagccccagaagctcccgacaggcccaccatctccacggcctccgagacctcagtgtacgtgacctggattccccgtgggaatggtgggttcccaatccagtccttccgtgtggagtacaagaagctaaagaaagtgggagactggattctggccaccagcgccatccccccatcgcggctgtccgtggagatcacgggcctagagaaaggtaggggcctggccacaccgtggccttggcctgatcccccagctgcccctttccgcctggaggaggatgacgagcctgggatccccttctctcggcccaggcccccacccaccagcatgcctccatgttgctgtctgtggtgtttaccacagtcctaaagccttctgcctccctccagaagagcatccagagccatctcccctgcagctcagctctgacagtggcgggtgttcttgtgaggcctttgagaacttgctttggggaagggctgcccagaagacccctccaggtcctgggccttgaaaggccatgggagaatcagaaggtatttcccagctcctgagttcagtgagtgtccctctcaccaggcacctcctacaagtttcgagtccgggctctgaacatgctgggggagagcgagcccagcgccccctctcggccctacgtggtgtcgggctacagcggtcgcgtgtacgagaggcccgtggcaggtccttatatcaccttcacggatgcggtcaatgagaccaccatcatgctcaagtggatggtaagcgggcctggccgtggactgcagtggaagacggcctcccctaaatgcccttccctgtgagcctggggattagactcccccgaacagggcacctgaaagcttcatcagtggaatttgggaggctcttagtggctggagctgctctagtggtctcctgttgattctggtgccttgacctggtagacctcaccctccttcctgcccttcccctgacaccacaggggatcccaacacaactgttcagggccccttctcagccacaggggcccctcacatgtccagggagatcagaagcaattgaagtctttggagaaatggcaatttgtttcttctcttcaaaagcttagggacctctaggctaaataaaataatgagtaatctttacaacatttttcagagaacctcagggatatcattagaaatctttgccaggggtcccaagtgaaattcaaactctggactggggtagaaccttcatacaccagtggttttgctttgatgatgttttctctgcccattgtcaacttgtttcttctccattccctatagtacatcccagcaagtaacaacaacaccccaatccatggcttttatatctattatcgacccacagacagtgacaatgatagtgactacaagaaggatatggtggaaggtgagacacagttctgtgtttatagcttctgcgtgatatagtttcctccgctggcatgggggacaaggtattggtgaaatctggtgaagcataaacctgcatctggtgtgacacgaagctctaagctccgtgtcattgactcattcataatacccttgaagctgtcaacttcatgaacccatgtgatgatgggacaacctgggtggacacctagaacatttcctccagcgttcctccacacgccgcccctgtgccagtcagtggcatcctcccccacacactgccccagctgagtctgactatgagattgggatcaagaaaaccatatacacattgccatgcaccattctctgactctgtttcccaggggacaagtactggcactccatcagccacctgcagccagagacctcctacgacattaagatgcagtgcttcaatgaaggaggggagagcgagttcagcaacgtgatgatctgtgagaccaaaggtgaagctctttgggttctctctcctgtcttggtgtttccagcgagggaaggcagagtcaccattccctgtgcctgtgcggtgctgggcctctttcccaggaagactctttgttttccaaataccctcagacttggtcatgtttcactctctactcatttgtctgtgcctaatactaaatagaccatgatgacaccttcaaggaacttgataattaactcatccatgaaatcaggggatagacctcattcttaagttgggaacttcctataaatactttattcctgcaatgatatttggtgcttacatgggttggtttatttaactgaactacaatcccatgagatgggaaaggaagtgggcatgaggaagctgtatactgcagccaaggccatgcagccggttaggggtagagcatgctttgggccaggattgtcttaactacaagaccagcccctttctgttgcacttaaaacatgttaaacatagtcacataataacttgttaatatttgcacattggtcagatggggagatagcattatctccgttttgcagatactgaaagtgagataaagcagttgtattgcaaagaacataatcaggagaagatcacaaaggaataggaatagagacagaacaacacatttttctctcatcaaggcaatggcattctctctcctgcttcactggctttcagttgttcagcagatcctccctgagtgcctctgtgtctctccctgccctcttccatcatgcacaccagagggagggcagatacatgcacagcccagaatcctggatcacctggtgcagggagtgcccagagggaggaagagacttcataaagccttcacactggtcttctggaaggaccgagtcttaggctaggatgaggagggagtggcctggaggacaaggctggacatagctccagatggttggggtgtcaggcaccgggaaggaggttatgggagtgaatgcctaggaaagaggccactgaggatggtgtgagatgagccggtgcagccagggagagctggagccactggaggctgtgaggtggaggagggctgtcagtggatttgtctgctgagatgggtcactggtgactgtgcagggaatgggctgagggttgagaactggggctctaaagtaaaggtaaagagaagggatgggtttgagtctcttttctaaggaggtgtgggcgggaccagggtcagcttgcatgctagggctgggagagagtgaaagaagttaaaaataaacttcaaggtttccagctggaagtactgcacaggtgatgttgccacttattgaaatggcaacggcaagaagacagatttcatgagaaaggaacaaggtaaaaccacttggaggcttactgagtctttgactctttggagacattgaaatgaagtgtcttgataaggagcagagctcctgccccgtgcagggggtccgggtggggagattggtttgcggctctttaggatataggtagaagtcacgggactaggtgagaatatacagagagtacagacgggaggaaccaggaaggcctcccagtgtctgtggaggcagacggcacagagaggaaaggagaggcatacagagcagcagagaggtgggggacattaggggacagagtccgaaagccgggggagaagatggccacgagggccagcagggtcagatgcacctcctaacagcaaagctaaagtgaggagctgatggccttgactccacctctgaattggcatctcacatgtactgtgtgtcctcgtgagtccgggaacacctgtccccctgctgtgatccatgctaatacctagtgcttcacgtctcagtccaccagcaggtagcacgctcttgggtgtcggtaaattcttccattcccaattctttttctggctcctgcattttaaatattttcttccaaaagttcaccagttcttcccaaaagcactacaccgcttctgccggaaggacccagtccaactctagtgcatggctcacagacatctcgctctgctttgaaatataaggctcaggtctccgccacaacaccagatttcacattagattccaatttcatgctgagtgtggacaccattcaaataagagattttgaggcccaatctagtgagtctgaccccatttcccaaacccatggaatgggggtatttttttttctatttgttgtgaaggaaatatcaaagaaacatatgctgaagtgagttttgtccacaattacagctcggaagtcttctggccagcctggtcgactgccacccccaactctggccccaccacagccgccccttcctgaaaccatagagcggccggtgggcactggggccatggtggctcgctccagcgacctgccctatctgattgtcggggtcgtcctgggctccatcgttctcatcatcgtcaccttcatccccttctgcttgtggagggcctggtctaagcaaagtgagtgagtgacgctttcagtgggaggatcctgggtgggaaatgggggctccactaaggaggcctctgcctaggtctgtgtccatggaaagctcaagcccaagtcccccaaaggtctcggaggtcagagaacacccaacgactgggcccctcccccagctcacagacctcggcttggggaggaggaaggagggaaagttgggctgtcttctctgcacctttggagctcgggacctatgttgtgccatcttctgaagtgtccgaagctgctcctctgacctcacattcctacttacagtccatcctgcctcttccctgggtgcggagctgccttcagctttcccctctatcctggaatctgacttttagtcactaatttctgcttcagatggcaaaacatctggtcagcttacctcctctaaatattgttcttcttttcactcaccgcctcctgcccccaagccctggaccctgtatctccccacccttctccctgcagaagagtctaggtgtcaggtagaaatgggcgacacaaaggagactctaggagaaaatgttctccatcgcttgggcactgtcaactccctgcctacgtccttcaaccctctgtggccaggagcctcctgagatccttgtggggcttttccaacccatcccgggctaccttggcctaagcacacctttatttttctgtccttccagaacatacaacagacctgggttttcctcgaagtgcccttccaccctcctgcccgtatactatggtgccattgggaggactcccaggccaccaggccagtggacagccctacctcagtggcatcagtggacgggcctgtgctaatgggatccacatgaataggggctgcccctcggctgcagtgggctacccgggcatgaagccccagcagcactgcccaggcgagcttcagcaggtagcgcattcttgggtgtgggcggcaggtatgggacacccaggagggagtggctgggctgccttggggggcctcctccctcctagggtctcaggctgggctgctgggccaggctttctttagtcaggagcagatgctcctgttgttgagtgaagactggaaagttacctggactccccggcgtggccgtctcattactcttccttttgagcagcagagtgacaccagcagcctgctgaggcagacccatcttggcaatggatatgacccccaaagtcaccagatcacgaggtaaccaggcctctcccctttcactcccaagccccacagcctcactttccctttagctcctcaaatccaaggcctgtcactgagagccaagcagtagtgctgtactcaggggtccccgtgactgacaatcatgctcctctgaaccattgccctaataggcagttgttgcatttgcaattgcgatgccctttctgcctgagggcatggcttggcatctcggaatcctccgtcactagacagatcagaagcacccaccacaactgactttgcccatgggcccctggacacctgacttcacattctcccacatggagtaaaatggaaatggactagaatgatcagtgggaatgatggtgtggtacctcttgatgttcaaaggggagagcagtccttgccccatctgagctctcaccagctctgatgccctcagacagggagacagccagcagggggatggggcgacaggcccaccctgcccagccccacctccccatctgggcttgtgcactgcaggggtcccaagtctagcccggacgagggctctttcttatacacactgcccgacgactccactcaccagctgctgcagccccatcacgactgctgccaacgccaggagcagcctgctgctgtgggccagtcaggggtgaggagagcccccgacagtcctgtcctggaagcagtgtgggaccctccatttcactcaggttggttccaggagcagggcagggaaattaaacaggctgggggtgacatgaggtaggcatccacaagccagtagtaacagtcttcaaaggtggggcttggtaaggagccagccacagcatttatgtgggagggatggggcatcgagggtggctggccactttccttcactgctgaaggcccagtaggtctgtgggatgtccaagtgggttctactgcaacatgataagctgcggtcctcagcctctgagaaaaaggctatttctccatttcagagaaaaaagccctttttggtctgtgcatttcaaggccattcacaaattccatttgctgctcatcacactaagaggcattctctaatcactctgaaatgccttgctttgttgaggcttgtctcttaattaaggaataaggttgcctcaatcattaaggagccaaattcttacaaacatcatcatcataactctttgtacttccacggaactttttctccaaggagttttgggccattcacgctaagcccatcccattgtcttcctccatgctagtctccttagaaatcagtggatacttggtgagggcaccaagtatccactaacgtttcttagcttctctgtgtgtgtgcccattcataggcagatcctggactctgtctctaggagattaaatttaaaagatgctgggtcctaaagctcgacccagcatcatttaaactggaccgtgtcaatctggggggactggattgtgagtgggatgattgtaaccagaagccatagcaaagggtggactagccgcctaaacatagaaagagcagggcttccttctgcgtttcacgggctgcactgacttcatctgctcctgtggtgtgggctcagtgcgggagtctctacagtcccagcatgagtgggaaatgggtggcaagtggccctccctgttttgatgagagaccttggagggaacagaagtgcccttgtctcggttgtaggtttctgtcccctttccagagccagtgtaaccacctccaccacagatagagattggcccagtgtcactgggtgttggctcctcggtcaatctggattttaatggttcctactctttctcccctcagggcccccatgctgcttgggccttgtgccagttgaagaggtggacagtcctgactcctgccaagtgagtggaggagactggtgtccccagcaccccgtaggggcctacgtaggacaggaacctggaatgcagctctccccggggccactggtgcgtgtgtcttttgaaacaccacctctcacaatttaggcagaagctgatatcccagaaagactatatattgttttttttttaaaaaaaaaaagaagaaaaaagagacagagaaaattggtatttatttttctattatagccatatttatatatttatgcacttgtaaataaatgtatatgttttataattctggagagacataaggagtcctacccgttgaggttggagagggaaaataaagaagctgccacctaacaggagtcacccaggaaagcaccgcacaggctggcgcgggacagactcctaacctggggcctctgcagtggcaggcgaggctgcaggaggcccacagataagctggcaagaggaaggatcccaggcacatggttcatcacgagcatgagggaacagcaaggggcacggtatcacagcctggagacacccacacagatggctggatccggtgctacgggaaacattttcctaagatgcccatgagaacagaccaagatgtgtacagcactatgagcattaaaaaaccttccagaatcaataatccgtggcaacatatctctgtaaaaacaaacactgtaacttctaaataaatgtttagtcttccctgtaaccttcaaactgagtcatgtgtgagtcagcattttctttacatgttagaattcagtctctgagtatttgaagaaaatacccacttacaatattttcaggtccatcagaaatgagatctgaaaaaggtagtaaatgtttctcttttttgttttttaaaacagtgaatgtcagttgtgcttggattcatgcagaacacattaccgtttagtccacaagggaaccgttgtacaacagaccaggaaaaacaggttcatagttctcttaccaactggacttgagatgaagtttaggtcatattgaagaaatagaactaatcttttttatataggtgtgtgttgaagaccaaatattttctccaaaatactgtttagctaagtgctgtgccacacatggacatatggtgcataataaattcacttcccttctttccaaagatacaccaacattgccagagtagttgactcactagtttaaaatcaacatttacttactgttgtccaaccaaaggatcaaccatagattcttttttaattgaaattttaaaatctttatatgtggaagtggaattagatggagactgatgcttgcaatgaaagccttactacgctttgtgttttggggctggagagggtggggggagcctgtattttctagatttctgtaaaattgagttacagatgaaatgccacttgagacaatctcgttaagtggggggccagaccctggcttttaaacatgaagaatttgataaacagggtcctagggaagagtcactctgactgtttagggcaagtgcatcctctgctggccaaaataagtatagcacctgctattcctgacttctgcatcctttttccatcaagctcaacgtcagagagaacttcatgtggaagtgcagcatggttttcaggaaagcagtatttt

SEQ ID NO: 554 - DNA, 13220 bp, Homo sapiens
agatgtcatagacttaaaaaaaggagtggctcattttgaaaggattggaggagtaagttactgaaattgttaagtgcttaataaaatgaatcaagtcttttacatgaatcaccatttttcatagttactctctccatctttatttgcatggataatcactgactgtttttgaagctacatttgtttttgttttggtttattttgtttcgtgtcttccgtagaaatacttgttttctagatgtaattataataagggggataataaaagggtttagatacaagaaatgacaatgatactagtatatcttttaatttcagagttgttttatgtttcgtatttatccagctgtaacaataaagtaggacttgttatatgggcttacgtttttatccatttctccctttctgtctgcaggaatctgttggggatttgatgataaggaatattcagttacatcattcaggaaaatatctctgcacagtacaaacaaccctagaaagtttatctgcagtagccgatatcattgttagaggtaagcataaatggtgaaaaagtgatcacattgtttcttcacagttacagtgttcatatctaaattgtagacctctgagaaaccacaccatgttatggaagtgagatgtaatcagatagagttttattttttaaaccccaggactccatggtatgggtagtgtgaatacagacatggaactgtgtgaatacagacatggaactgtgtaggatttgactatcatgaacggtcacgcttggcaagcggtgtcagtaactaaaacttagacataccttctgtttataataaatcattcttgtcaatccagagtcaaatccacatgctcctgtagttcttcatattagctgcaattacttgagttagattttaagaggaattaaagatgatggttctcaatctttgagtataggttgatatgcaatcatcctatgcctgatattttctaatctccagaggaagcactactacattaatgtcatttaccatgtaaagggaattaatagaactttatcgctaataatgtgctataaatacattatggtcaatattttacttcctaagcacaacaggtaaaaataaaccatcctagtaccaaattaatgaatgtaagtatctccaatggagtcatgataaaacatttttttcaaggtccaccaggtcctcctgaggatgtgcaagtggaagacatttccagtactacttctcaactaagttggagagcaggcccagataataacagtcccattcaaatatttactattcagactcggacaccattttctgtgggttggcaggctgttgctacaggtgagtgacaaaagtgttttgggtcactttaaaaataatattttagtccaataattttaataaatgcaattacattttaaattaataattatataattttgtacaattatttgtttttgagtagtcccaacctaggtgccttagtgtctcattctttttagttccagaaattctcaatggtaagacatacaatgcaacagtggttggtttgagtccttgggtggaatatgaatttcgtgttgttgccggcaacagcattgggattggagaaccaagtgaaccatcagaattgttaagaactaaagcatcaggtaaagaatcaatgtgttctaaaagtgtggaagatttcgtatgatacagttcttaaaacaaaacaagtatttttatgtgtcttctaatacttttggctcaaaattgtttggcagtaaacgagtggctctcattttcttttatttttacatacacaaggcaaggtgtattttctccaaatagtaggttcaataagaaatgattacctttaagccaacatgtcaaaatcagagttcttaggaaactgtgtttgcatcgcatctattttctagtcaaaattcattagagaatctgtagatttgtatatgcaaatgagttactgcttgtttcattaaaatgttgtagccaggaattaactgagactctgttggtgcagtcagccatatattttcatctatttctcaactctgaactagttgtagcttcactgagcagtagtataaatttttttccatgcaaatgaggtaaatcctaagctcatttaacaggggcactaattgagcattaattggttcactgaacagcagaacgcaagaacctggatcagataccatgccttcttaagctcttttcaatggatcctctttgttccactcaaacttttacatccagggtgacatttaatctgctagctgtatatagcccacaaagttcacattcttattcgatcacataaacaaaggatcacttgtcatggctagcttaatttaacaaacacaaattaccttattaaagtgtgcacaattgtcagaagtcaataaatcaatccttaaactaaagataatgttatatgtttatcatagaattggggctagaaaaaggacatacttgacagtgatatcatccaattaaatcacgctagaagcttacagctgagaggaaatccctttgttttacagaagaggaaaatgaacaccaggatattagctggttgtttgtgacagagctaggttttgaatccaaacctcctgatttttacacccagcattctccataaaagaggatcttaatgtagatgagcaatagattagccaaagaaagtgtgtaaatatagaaattccccggccctcctatataccccctggatcagaatcttcaggtgttgtccatgactctggatatgagctttagtttcaggttgtttgtttacagttgatttatattttggtagctttggacagggttgacagaaactcttacattttcatagcaaagtttgtgtgccaccttctaaccattaatactctcttgtttcagtagcagaatgagactggtgatattcatacccactgagtcaaactctactaactgaaaacctactgagtctctcgtctctccctctctgtctctgacatcatcaaagactaacaacttgttctcaatatggttttaggcttaagtacaattaatttaaaattgaatagggaaaggaattttctatttctcagaacattggaaactttgtagaaagtaaatcaaaatataattcaaaatacttttccttacacagctaaactatgcaaagatcctgagatagtgtgcagttagtcactctaagctgtcaagcactataaattcagcaactctgtaaaatccactctgattcacatcgcttttgatcaaaggcattggaagtcttagaaaataaggtttaggttcacataacttctttctaaaaaattatgaagcttaaagctgacaaagttaagggtaaatttaaatacgaaaaggtatatctgaaaggtgcaattttgaaaaagaacaatcagattatcatatgactattttctggtcatgtttatagagctaaacatcagtatgaaatggaaataaataaaataagcaatctagatttatttaggtggtctatatggtggggaaaaatttgaaatgaggaattaaaacttacatattttaatccctgcctaccaatccccagacatatccaagtgcctcctcaaccaaccacctctcctattgttcagacatggtccagtatagacaatttcatgtaattccacatttaaaaagtataccctgctgatttagcgattatcacagatttaggatacttttgtcattacgtcaagaaaaataatgctttgaaacacttacgcatgtgtaaagtaaaacctcatgctcgtgaggcactacaataccatatacacactcagcatttcctcagcctgacagttactatgatctatgattcatcgtgtaagtccttacaaggatacagagttgaagggcatcgtcttataactcatcaaaattactggtttctgaatcctctaccacagagccttagatcccaagaaataaatagaaagaacctctcccagtcgcattcttgacaggagaaaaacctgactttgcaagtgaaaagttagaagaaaatccctcttcttctctcccgagagatttgagattgtaacgaggagttttaaaacaagaatatttatttacatatttttcagtatttaattttaactggtaaaatatcctgatgactaataaaaggaaaaattagtttagtttgtttattgaaaaaaaataattaatatactgcctcagtaacttgtttacagctcaactgtataattaggcactaaatcagcagtgtcactgtcaccatctgaatggaacatcattttgccaattagtagatgatgcataatgatgtcaaatacccgatgttactcaatttttaattaattttggagccagggtgctcatgtatcaaacacaactgtgtcctctctcttagaaatttggatatgtgtaaacataatttacgttcattaaaaatgcaagactctctcacagtatgcctgtgtgagattttgaaaagtgaaattcaaaaacaaaattcttcctgatgaagacgtactttaataattgccatcccacatttctcttggttatttttagtccctgttgtggcaccagtaaacatccatggaggtggaggaagtcggtctgaactcgtcattacgtgggaggtaattttctgtccaactgagttattttgaagaaaagagatttaactggccagaaagaaactgaaaaacaaaaagatttatttgatcactattgagagcgtaaaaaaatatggtataaaaatacatcatcctgatgatgaattatttagaggaggtattaggaacttttctcatggtgagacagtatgacgaactcagcacaattttctcccaaatacacgaaaaacaacttcagtatctattgagcgtgtgtcagtagcattttcgttatcgcttgatgaattaggcattgtttgatttgttacctgtggcactgttgtattgtgaataagttgagcccagtagactgtaggcaaaaaatagttcttgtcctaaccctgctgttcacctctgatcaactcattcttccctgcatctagatgaaagcttaggcacatggagtagattttgtggtcattcttattacccattaacatacaggctcatttttttaccttattaaaaatttcagtctggtgtgtacacttcaaactggagtataaacgttagaatttagactttcaaccaatttaaagtttctcattttcagtatctcagtgcctcagcctaagaattctatagcgtgaaagggaatacgtggtcagttcaacttctctccattctgctctttaatttatctttccccattcacagtgttacctctggattctccagagctgtagaaggttggtgttggtaggggaggagaaaggaaaaggtctggattgctggtacatttctcgtttgactttggtgtgctctagttatggcaaattatcagacgctgccatttcatagggtagggtttctgcgttttttaatttattttttatctgggagatggccactggatgatcccccaccaaggactcccaactgcaattccttggtgcagacccaactggctgctgaagggtatcagttcctggattttggtggtccatttccagactcttccagtgaatattctctctcttgtaggtggtctttgtggatagagtccccttgaaggctgtccatggatgacccacttgcatgggtttcacatttgtcctcagcagacacataccctgctccatgtttagcggaagtgcaatgcatacccacttagcatctctcttcactctgccaccgtgggctgtctggatctcttccccactttaaatttctcagacatttgtcagttaaatgaacctgcgtcccttatgttccaggaaatgcaaaccaggtgtttcttgctgtagcctacttcacatagctaggctatgagagataactgggaaccagagacgttattctttatggttataaatgacagtgtcagaaactagatgcaattgccctgaaagtcaccctttcctctggatatcttgtttcatgtggacattataggcctagcacagtgcttggaaagtggtccaccctccatgaacacttgttgaatggaaggtagtgttttcagagagttggaactctcagaggccagacagagggggaaaccctattttttcaagcatttacaggatttcaggtgccacacagagcatttcatatcattcagtccccacaataatgctataaggtggttataccactttcaagtaagaaaactgagacttagaaaagtgacatcattgggcagagaagcatttgaacacagggttctctctttctgttcttttactgtatcctgtattacaatcccaattgtcttcatgcactgtgatggctgagggtgggcctgagtccttgagtatatctaccttaagtagtaagttaaccatattatacctactactccaaacatatttcccataaaacactgactttcaaatgagtctacaagagaattgtttgtgagtagtttatttaggtttctatattcatcaaaggccaaataagcattatcatcatagtgtacaggaagttttgcctgacttaataacttattttgttctcctccttggtaagaaattcctacaggctgttgttgcaattgcttgtacacagtctataatgagggcccaaatgctatgcattcattcttaaatagagatgagcatgaattaccaaagaatactgtctttccacgatttataatgttcttttttctttaaggcaaaggtacacaaaccatgacctatgagacaaatttgtctagtttcctgttttgataaataaatccacccatagctacatccattaatgtattgatgctttcttgctgttgcatgagaccatatatcccacaatgcttaaaatatttactatctggtagcaacaatagacgctagcgtctgctagagtgacgagaggaagggcgagggttgaaaaactagctatattaatgggtactgtgctcactacctgggtgacgggatccatcataccccaaacctcagcatcacacagtatatccatgcaacaaacttgcacatgtacccccgaatctaaaataaaagttgaattttttttttaagtttactctctggccctctacagaaaaagcatactaacccctatttttaaaaattaaactaaattaaagccacttcctctgtgtttattttttcttcctgaggaggaggtggggggtggatatctgatatgcagatacttgcagaaagtaaattagtgaaatcggtttcccatttatcactcatatttgacattatgtacaagcagatactgagccaacttcttctggtgcccagcttctttatggaataagttatgtatatttaggagaagattcatacattaggatgaatctgagccaccagaatgcaggtagtaattccttcaatttaatgaactctattaggtagcttctctgttcctatcagtggaatacaaaaatggatgagaaaaggtctgaatgctcagaagcgtagaggacagaatggtcttaacccagcctggaaggaggtcaggaaagacaccatcagaactgagtatatctgaactacgttttgaaaagtgacttggaagtagagaggccaccccaggtcaatgtcactcctgttgtagttgaaatagtacctgttggactttgaaaggcactgcgcgacacaagactgttctaagttcagtcacaatctgccattacgtttcataagtgacaactttaatgattatccttcatttaggctccctgtggtataatctgcctgaactgaactaaatatctttcccgtgttttccccagagccacacaataaatgtagattttttgtttatttgttttgatttggtttgtttccaaaaacctagacataatatcaaatttttagaatatagcaatgggtaattcctttttaagggcatgtttatacattattttatcataatgtgtatactcccaaatacttccaggtttgaggtgcttgtggtgaatgtctcataaatattactataaaattaggtacacaggataaagcactatagagtaagagatacatacctacactgagggttggcacgctttttatttaaagggccagacagtaaaaatattcagtctcgtgggccacatgacctcttttctaatgtctcagtctgcttttgtagctcaaaagagccacataccacttacaaacatataggtgtgggtgtgtctcaaaacctttattttcaaaaccaggctgcatgccagatgtggctagaagtacatagttttgctgattcttagtctgtactaaagatttggttcttacagacactgtggttgagaattacattattagtttatcaattttcatagattttactcccaggagaatttcacaatttctttattttactgaacactgtctccacttaaagaaaactctttttctggccttgttaaataactatatatattttttaatcatttgactctctgttgatgtaagaataaagggaagtatctaaataagtctcttttttcccctctaatctgcatatgttggactcaggtctttcttgagagagcaccatgagaaacactaattgtacttgactaacaaaaacaaaactcccctatttatgtagatgaactgactaagcatcgtgattaaatccgagatgaaagaaacttcagaaatgaatcaaatgctctagcaagtagcatcgattcttataaatctcttccatgccattcaaaattaactggtttacttctagtctccctatgaaaaagaagagaagtgttaatatgaggaaatactttgttgtttccccagatgtccggagcagcacttttcttcctcttttcactttctgtatttgttagactgttccacatggcaagaaatagagaccagctcaggtcatctcgggtaatgggggtttattttaaagctacatgggaagtaatgaggacaggaaaaaagtctcagcaagcaggcaggaaggtcagatgaagaaccggaacatggttcatcactgctctgggcactcgggcacaggagctctaggcaaccatcaacaacccctctgctgatccagccccggcttgaatagtctctcatgcttatgcctcagttcctcccatttcctttacttccagttttctacctggctgccagctaatttggatgccctctctctaatttacagcatctgttttctcttagcttctattgcctcactgttcctgctactccatgttctctactttttgcctgctctgtgtatatctatcattgttttgccacccaccatgtttcatatgcaaactctgtgagaggaattgaccaggtctgttagtcaccgtagagtacagagattctgccctcatagatactcaccaagacggtgcctgtggttctggcgctcgtgaattggtgctcgcatgggttccaagtggcaagatagatagtgtgattgatagaataaatggactcccatgaataaagagaacctctgaaatggagttgtggacatgagggactagaagcactgtgtcctgtcaggtgttgcctttattagtctgtcagaatatttattaaaaaaaaaaaagcaaagcattttccttgggaaaaaccaaataaattccattgatttttcaatacaagtttcttgccatcaggagatatgttggtctaaattcaagtacagattcattttaatttgctaagtttatgtgattgtttacaatttttagtatctgcagagtacagggggaatattaccaatttctattttgctattttagtaattttagatttgaaatgtattttatagaatctgatctttgtgagagttaacagtttattctttcatgtgaggaaaaatgcacacatgtcactaccaatgaagatgtatgcctaaaaaaatgatgggaggtcttttatacttttttaaagaaatattctgtgtcttaaagcatatgttatttcacagtaattccattacacatgtcttacaaaaacttgtttaaaatgttgtgaaaggaaaacatatctagtcttgaaataaatagttaagaagttaatttgtgctgagtttaaaaattcatatcaaaccacatttgagtgtgtatcataaaatcttttaaactgttttattattataatttatgaatgatcaaagaaaaatatataaatatgtaaagcttgttttatatttctatctgaaaacttaaactatttatctgagtatctttaactgggatcatttttctaattggcattccaaataaaagtgttttttaatacatcattaaacagaataaatatccatatttgtctctatggaagaaatgtgaaataatcaataaacattatagtagcttaataaaatatttttgcaaatactcagtgattgatcacattctgcccaagtcaattccagaagaactgcagaatggggagggatttggatatatcatcatgttccggccagtgggctcgacaacctggtccaaggagaaagtgtcatctgtggaatcatcaaggtttgtctacagaaatgaaagcatcatcccactgtctccctttgaagtcaaagtgggtgtgtataataatgaaggagaaggatccctgagtactgtgaccattgtctactctggggaagatggtaagttgtcctcaactctggttttctttgagactctatgcatagtttgtgttcccttgttccattttcaatgaaccactctgctaaagatggttatgtctttctctggatggtagaacctcaactggccccaaggggaacttctctccagagtttttctgcttctgaaatggaggtttcatggaatgctattgcctggaatagaaacactggaagagtgctgggctatgaggtaatccacattaatttcacttttgcttatgaatgtgccaatggacttcgcaatagctcctattcaacagtcctatcctactagcctgttgttagcatatgataatgtgtgtctaaagctaaagcagagaatgaagttgagacagggtaggtgagcccccacattgagaggcttagcctgggatgtttcttgtcctcgctcaagacagaattcgagagtgagccagtggtaaaaaaacaaaaacaaaaacaaaaacaaaaaaaaacagctttattgaggcagcagtgttacagttttgaaattgcttctgcagagcagggctaccccataggcagtgtgctaagagcagcagcttggaagcagttctacactcatatttatacccacttctaattacatgcaaattaatgggtgagttagttattcagaaatttctagaaaaagggtggtaacctccaggccattgccatagaaagggatggtaacttccaggtgttgccatggcagtggtaaactgatacggaactggtggttgtgtcttatggagaggtgctttagcctcttccctgtttcagtcagtcttcaatctggtccacagtaaagtcctgcctcctccctcaaagtaagggaaatctttctaggtaattcaaagcaaacaaattaacacatagtagccatttttaaaggcatacagattcagtaagtaagatgagtaagctctaaagatctgctgtacaactgtgcacacagagtcaacaattatgcattgtacccttaaaatttttcaagaggacagatctcatattaagtgttcttaccacaacatcatttttcaaaagtgatcaggtgattatatgattaattattcaaattgcagtcatttttttttcccttggtaagaggtgaagtctgctcctcaatcatcttacaccatggaagaatttcattgagaaacctgctttgtgaattgcagtataacttggaaagatgtaatcatctcagaaaaggcagttaagtaatgaaaaaaaatacctagattgtcttgaatctgctatttttagtctatgaagaataaggcaaattacatttgtaggccttcatctcacaaagtaaagagacaagaacattttaagggaaagttgttcatcactcaatctttttcaacttgcaaattcagtgattcacaaaatgggtaacataatttatttaactttggatttagaataaatgtataatcctaaacattcttaattttgcctatatatatatatatatatatacacacacacacacgtatacatatacatactatatatacacacatatatatacatatatacacatatatatacatatatatacacatatatatatatatatatatatatacacacacacacacacatatatatatatatatataaccataatcctctgattccaacagaaagttctactctcaggacaggtgtcttttccactccatgccaagaatgccttacctcttatctgaaccctagttacttctcaaatttcatccctagtcgcctcttctctctgagctctactcccatcaattcctgatgtattttgtcaaattcttgtagcatattttttctataccacttctttgcaatgcattctgtgacttattttcacatacactgtggattctaacctcttagctagatgataaggggcttgaaaataggtacttaatttattctctttttttttcaatgtacctaaaacaatgctaatgcaaaggtagggttcagtataaattgaattattaattaacctgtgattcaaataactctgaaaagaaatgccaatagcaagacattataatgaaagtctttgactgattatatacaaatgtgtttttgtctgacttgttatacatcatttgctaaagctggtaacctttagatagctcataaaatactttattttggtaatctaaaaaatcacgttctctaatttccattgtgaatttgcattcatgacttttttcctcataaatattagagaataacaattttgttgttgtataaccattttaattagaaaacgtttttgtcatctatacttctgtcttcttcccatattccttgtggttgtggttgatagttgttggtaaaaaatgattgatagttattggggaacaataaattgcttgttttggtttttaattatcaggtcttatactggacagatgactccaaagaatcc

SEQ ID NO: 555 - DNA, 10957 bp, Homo sapiens
agatgtcatagacttaaaaaaaggagtggctcattttgaaaggattggaggagtaagttactgaaattgttaagtgcttaataaaatgaatcaagtcttttacatgaatcaccatttttcatagttactctctccatctttatttgcatggataatcactgactgtttttgaagctacatttgtttttgttttggtttattttgtttcgtgtcttccgtagaaatacttgttttctagatgtaattataataagggggataataaaagggtttagatacaagaaatgacaatgatactagtatatcttttaatttcagagttgttttatgtttcgtatttatccagctgtaacaataaagtaggacttgttatatgggcttacgtttttatccatttctccctttctgtctgcaggaatctgttggggatttgatgataaggaatattcagttacatcattcaggaaaatatctctgcacagtacaaacaaccctagaaagtttatctgcagtagccgatatcattgttagaggtaagcataaatggtgaaaaagtgatcacattgtttcttcacagttacagtgttcatatctaaattgtagacctctgagaaaccacaccatgttatggaagtgagatgtaatcagatagagttttattttttaaaccccaggactccatggtatgggtagtgtgaatacagacatggaactgtgtgaatacagacatggaactgtgtaggatttgactatcatgaacggtcacgcttggcaagcggtgtcagtaactaaaacttagacataccttctgtttataataaatcattcttgtcaatccagagtcaaatccacatgctcctgtagttcttcatattagctgcaattacttgagttagattttaagaggaattaaagatgatggttctcaatctttgagtataggttgatatgcaatcatcctatgcctgatattttctaatctccagaggaagcactactacattaatgtcatttaccatgtaaagggaattaatagaactttatcgctaataatgtgctataaatacattatggtcaatattttacttcctaagcacaacaggtaaaaataaaccatcctagtaccaaattaatgaatgtaagtatctccaatggagtcatgataaaacatttttttcaaggtccaccaggtcctcctgaggatgtgcaagtggaagacatttccagtactacttctcaactaagttggagagcaggcccagataataacagtcccattcaaatatttactattcagactcggacaccattttctgtgggttggcaggctgttgctacaggtgagtgacaaaagtgttttgggtcactttaaaaataatattttagtccaataattttaataaatgcaattacattttaaattaataattatataattttgtacaattatttgtttttgagtagtcccaacctaggtgccttagtgtctcattctttttagttccagaaattctcaatggtaagacatacaatgcaacagtggttggtttgagtccttgggtggaatatgaatttcgtgttgttgccggcaacagcattgggattggagaaccaagtgaaccatcagaattgttaagaactaaagcatcaggtaaagaatcaatgtgttctaaaagtgtggaagatttcgtatgatacagttcttaaaacaaaacaagtatttttatgtgtcttctaatacttttggctcaaaattgtttggcagtaaacgagtggctctcattttcttttatttttacatacacaaggcaaggtgtattttctccaaatagtaggttcaataagaaatgattacctttaagccaacatgtcaaaatcagagttcttaggaaactgtgtttgcatcgcatctattttctagtcaaaattcattagagaatctgtagatttgtatatgcaaatgagttactgcttgtttcattaaaatgttgtagccaggaattaactgagactctgttggtgcagtcagccatatattttcatctatttctcaactctgaactagttgtagcttcactgagcagtagtataaatttttttccatgcaaatgaggtaaatcctaagctcatttaacaggggcactaattgagcattaattggttcactgaacagcagaacgcaagaacctggatcagataccatgccttcttaagctcttttcaatggatcctctttgttccactcaaacttttacatccagggtgacatttaatctgctagctgtatatagcccacaaagttcacattcttattcgatcacataaacaaaggatcacttgtcatggctagcttaatttaacaaacacaaattaccttattaaagtgtgcacaattgtcagaagtcaataaatcaatccttaaactaaagataatgttatatgtttatcatagaattggggctagaaaaaggacatacttgacagtgatatcatccaattaaatcacgctagaagcttacagctgagaggaaatccctttgttttacagaagaggaaaatgaacaccaggatattagctggttgtttgtgacagagctaggttttgaatccaaacctcctgatttttacacccagcattctccataaaagaggatcttaatgtagatgagcaatagattagccaaagaaagtgtgtaaatatagaaattccccggccctcctatataccccctggatcagaatcttcaggtgttgtccatgactctggatatgagctttagtttcaggttgtttgtttacagttgatttatattttggtagctttggacagggttgacagaaactcttacattttcatagcaaagtttgtgtgccaccttctaaccattaatactctcttgtttcagtagcagaatgagactggtgatattcatacccactgagtcaaactctactaactgaaaacctactgagtctctcgtctctccctctctgtctctgacatcatcaaagactaacaacttgttctcaatatggttttaggcttaagtacaattaatttaaaattgaatagggaaaggaattttctatttctcagaacattggaaactttgtagaaagtaaatcaaaatataattcaaaatacttttccttacacagctaaactatgcaaagatcctgagatagtgtgcagttagtcactctaagctgtcaagcactataaattcagcaactctgtaaaatccactctgattcacatcgcttttgatcaaaggcattggaagtcttagaaaataaggtttaggttcacataacttctttctaaaaaattatgaagcttaaagctgacaaagttaagggtaaatttaaatacgaaaaggtatatctgaaaggtgcaattttgaaaaagaacaatcagattatcatatgactattttctggtcatgtttatagagctaaacatcagtatgaaatggaaataaataaaataagcaatctagatttatttaggtggtctatatggtggggaaaaatttgaaatgaggaattaaaacttacatattttaatccctgcctaccaatccccagacatatccaagtgcctcctcaaccaaccacctctcctattgttcagacatggtccagtatagacaatttcatgtaattccacatttaaaaagtataccctgctgatttagcgattatcacagatttaggatacttttgtcattacgtcaagaaaaataatgcttttaaacacttacgcatgtgtaaagtaaaacctcattctcgtgaggcactacaataccatatacacactcagcatttcctcagttttacagtttctatgatctattattcattgtgttagtccttacaaggatacagagttgaagggcatagttttttaaaactcatcaaaattactggtttctgaatcctctaccacagagccttagatcccaagaaataaatagaaagaacctctcccagtcgcattcttgacaggagaaaaacctgactttgcaagtgaaaagttagaagaaaatccctcttcttctctcccgagagatttgagattgtaacgaggagttttaaaacaagaatatttatttacatatttttcagtatttaattttaactggtaaaatatcctgatgactaataaaaggaaaaattagtttagtttgtttattgaaaaaaaataattaatatactgcctcagtaacttgtttacagctcaactgtataattaggcactaaatcagcagtgtcactgtcaccatctgaatggaacatcattttgccaattagtagatgatgcataatgatgtcaaatacccgatgttactcaatttttaattaattttggagccagggtgctcatgtatcaaacacaactgtgtcctctctcttagaaatttggatatgtgtaaacataatttacgttcattaaaaatgcaagactctctcacagtatgcctgtgtgagattttgaaaagtgaaattcaaaaacaaaattcttcctgatgaagacgtactttaataattgccatcccacatttctcttggttatttttagtccctgttgtggcaccagtaaacatccatggaggtggaggaagtcggtctgaactcgtcattacgtgggaggtaattttctgtccaactgagttattttgaagaaaagagatttaactggccagaaagaaactgaaaaacaaaaagatttatttgatcactattgagagcgtaaaaaaatatggtataaaaatacatcatcctgatgatgaattatttagaggaggtattaggaacttttctcatggtgagacagtatgacgaactcagcacaattttctcccaaatacacgaaaaacaacttcagtatctattgagcgtgtgtcagtagcattttcgttatcgcttgatgaattaggcattgtttgatttgttacctgtggcactgttgtattgtgaataagttgagcccagtagactgtaggcaaaaaatagttcttgtcctaaccctgctgttcacctctgatcaactcattcttccctgcatctagatgaaagcttaggcacatggagtagattttgtggtcattcttattacccattaacatacaggctcatttttttaccttattaaaaatttcagtctggtgtgtacacttcaaactggagtataaacgttagaatttagactttcaaccaatttaaagtttctcattttcagtatctcagtgcctcagcctaagaattctatagcgtgaaagggaatacgtggtcagttcaacttctctccattctgctctttaatttatctttccccattcacagtgttacctctggattctccagagctgtagaaggttggtgttggtaggggaggagaaaggaaaaggtctggattgctggtacatttctcgtttgactttggtgtgctctagttatggcaaattatcagacgctgccatttcatagggtagggtttctgcgttttttaatttattttttatctgggagatggccactggatgatcccccaccaaggactcccaactgcaattccttggtgcagacccaactggctgctgaagggtatcagttcctggattttggtggtccatttccagactcttccagtgaatattctctctcttgtaggtggtctttgtggatagagtccccttgaaggctgtccatggatgacccacttgcatgggtttcacatttgtcctcagcagacacataccctgctccatgtttagcggaagtgcaatgcatacccacttagcatctctcttcactctgccaccgtgggctgtctggatctcttccccactttaaatttctcagacatttgtcagttaaatgaacctgcgtcccttatgttccaggaaatgcaaaccaggtgtttcttgctgtagcctacttcacatagctaggctatgagagataactgggaaccagagacgttattctttatggttataaatgacagtgtcagaaactagatgcaattgccctgaaagtcaccctttcctctggatatcttgtttcatgtggacattataggcctagcacagtgcttggaaagtggtccaccctccatgaacacttgttgaatggaaggtagtgttttcagagagttggaactctcagaggccagacagagggggaaaccctattttttcaagcatttacaggatttcaggtgccacacagagcatttcatatcattcagtccccacaataatgctataaggtggttataccactttcaagtaagaaaactgagacttagaaaagtgacatcattgggcagagaagcatttgaacacagggttctctctttctgttcttttactgtatcctgtattacaatcccaattgtcttcatgcactgtgatggctgagggtgggcctgagtccttgagtatatctaccttaagtagtaagttaaccatattatacctactactccaaacatatttcccataaaacactgactttcaaatgagtctacaagagaattgtttgtgagtagtttatttaggtttctatattcatcaaaggccaaataagcattatcatcatagtgtacaggaagttttgcctgacttaataacttattttgttctcctccttggtaagaaattcctacaggctgttgttgcaattgcttgtacacagtctataatgagggcccaaatgctatgcattcattcttaaatagagatgagcatgaattaccaaagaatactgtctttccacgatttataatgttcttttttctttaaggcaaaggtacacaaaccatgacctatgagacaaatttgtctagtttcctgttttgataaataaatccacccatagctacatccattaatgtattgatgctttcttgctgttgcatgagaccatatatcccacaatgcttaaaatatttactatctggtagcaacaatagacgctagcgtctgctagagtgacgagaggaagggcgagggttgaaaaactagctatattaatgggtactgtgctcactacctgggtgacgggatccatcataccccaaacctcagcatcacacagtatatccatgcaacaaacttgcacatgtacccccgaatctaaaataaaagttgaattttttttttaagtttactctctggccctctacagaaaaagcatactaacccctatttttaaaaattaaactaaattaaagccacttcctctgtgtttattttttcttcctgaggaggaggtggggggtggatatctgatatgcagatacttgcagaaagtaaattagtgaaatcggtttcccatttatcactcatatttgacattatgtacaagcagatactgagccaacttcttctggtgcccagcttctttatggaataagttatgtatatttaggagaagattcatacattaggatgaatctgagccaccagaatgcaggtagtaattccttcaatttaatgaactctattaggtagcttctctgttcctatcagtggaatacaaaaatggatgagaaaaggtctgaatgctcagaagcgtagaggacagaatggtcttaacccagcctggaaggaggtcaggaaagacaccatcagaactgagtatatctgaactacgttttgaaaagtgacttggaagtagagaggccaccccaggtcaatgtcactcctgttgtagttgaaatagtacctgttggactttgaaaggcactgcgcgacacaagactgttctaagttcagtcacaatctgccattacgtttcataagtgacaactttaatgattatccttcatttaggctccctgtggtataatctgcctgaactgaactaaatatctttcccgtgttttccccagagccacacaataaatgtagattttttgtttatttgttttgatttggtttgtttccaaaaacctagacataatatcaaatttttagaatatagcaatgggtaattcctttttaagggcatgtttatacattattttatcataatgtgtatactcccaaatacttccaggtttgaggtgcttgtggtgaatgtctcataaatattactataaaattaggtacacaggataaagcactatagagtaagagatacatacctacactgagggttggcacgctttttatttaaagggccagacagtaaaaatattcagtctcgtgggccacatgacctcttttctaatgtctcagtctgcttttgtagctcaaaagagccacataccacttacaaacatataggtgtgggtgtgtctcaaaacctttattttcaaaaccaggctgcatgccagatgtggctagaagtacatagttttgctgattcttagtctgtactaaagatttggttcttacagacactgtggttgagaattacattattagtttatcaattttcatagattttactcccaggagaatttcacaatttctttattttactgaacactgtctccacttaaagaaaactctttttctggccttgttaaataactatatatattttttaatcatttgactctctgttgatgtaagaataaagggaagtatctaaataagtctcttttttcccctctaatctgcatatgttggactcaggtctttcttgagagagcaccatgagaaacactaattgtacttgactaacaaaaacaaaactcccctatttatgtagatgaactgactaagcatcgtgattaaatccgagatgaaagaaacttcagaaatgaatcaaatgctctagcaagtagcatcgattcttataaatctcttccatgccattcaaaattaactggtttacttctagtctccctatgaaaaagaagagaagtgttaatatgaggaaatactttgttgtttccccagatgtccggagcagcacttttcttcctcttttcactttctgtatttgttagactgttccacatggcaagaaatagagaccagctcaggtcatctcgggtaatgggggtttattttaaagctacatgggaagtaatgaggacaggaaaaaagtctcagcaagcaggcaggaaggtcagatgaagaaccggaacatggttcatcactgctctgggcactcgggcacaggagctctaggcaaccatcaacaacccctctgctgatccagccccggcttgaatagtctctcatgcttatgcctcagttcctcccatttcctttacttccagttttctacctggctgccagctaatttggatgccctctctctaatttacagcatctgttttctcttagcttctattgcctcactgttcctgctactccatgttctctactttttgcctgctctgtgtatatctatcattgttttgccacccaccatgtttcatatgcaaactctgtgagaggaattgaccaggtctgttagtcaccgtagagtacagagattctgccctcatagatactcaccaagacggtgcctgtggttctggcgctcgtgaattggtgctcgcatgggttccaagtggcaagtagatagtgtgattgatagaataaatggactcccatgaataaagagaacctctgaaatggagttgtggacatgagggactagaagcactgtgtcctgtcaggtgttgcctttattagtctgtcagaatatttattaaaaaaaaaaaagcaaagcattttccttgggaaaaaccaaataaattccattgatttttcaatacaagtttcttgccatcaggagatatgttggtctaaattcaagtacagattcattttaatttgctaagtttatgtgattgtttacaatttttagtatctgcagagtacagggggaatattaccaatttctattttgctattttagtaattttagatttgaaatgtattttatagaatctgatctttgtgagagttaacagtttattctttcatgtgaggaaaaatgcacacatgtcactaccaatgaagatgtatgcctaaaaaaatgatgggaggtcttttatacttttttaaagaaatattctgtgtcttaaagcatatgttatttcacagtaattccattacacatgtcttacaaaaacttgtttaaaatgttgtgaaaggaaaacatatctagtcttgaaataaatagttaagaagttaatttgtgctgagtttaaaaattcatatcaaaccacatttgagtgtgtatcataaaatcttttaaactgttttattattataatttatgaatgatcaaagaaaaatatataaatatgtaaagcttgttttatatttctatctgaaaacttaaactatttatctgagtatctttaactgggatcatttttctaattggcattccaaataaaagtgttttttaatacatcattaaacagaataaatatccatatttgtctctatggaagaaatgtgaaataatcaataaacattatagtagcttaataaaatatttttgcaaatactcagtgattgatcacattctgcccaagtcaattccagaagaactgcagaatggggagggatttggatatatcatcatgttccggccagtgggctcgacaacctggtccaaggagaaagtgtcatctgtggaatcatcaaggtttgtctacagaaatgaaagcatcatcccactgtctccctttgaagtcaaagtgggtgtgtataataatgaaggagaaggatccctgagtactgtgaccattgtctactctggggaagatggtaagttgtcctcaactctggttttctttgagactctatgcatagtttgtgttcccttgttccattttcaatgaaccactctgctaaagatggttatgtctttctctggatggtagaacctcaactggccccaaggggaacttctctccagagtttttctgcttctgaaatggaggtttcatggaatgctattgcctggaata

SEQ ID NO: 556 - DNA, 13217 bp, Homo sapiens
ggattctttggagtcatctgtccagtataagacctgataattaaaaaccaaaacaagcaatttattgttccccaataactatcaatcattttttaccaacaactatcaaccacaaccacaaggaatatgggaagaagacagaagtatagatgacaaaaacgttttctaattaaaatggttatacaacaacaaaattgttattctctaatatttatgaggaaaaaagtcatgaatgcaaattcacaatggaaattagagaacgtgattttttagattaccaaaataaagtattttatgagctatctaaaggttaccagctttagcaaatgatgtataacaagtcagacaaaaacacatttgtatataatcagtcaaagactttcattataatgtcttgctattggcatttcttttcagagttatttgaatcacaggttaattaataattcaatttatactgaaccctacctttgcattagcattgttttaggtacattgaaaaaaaaagagaataaattaagtacctattttcaagccccttatcatctagctaagaggttagaatccacagtgtatgtgaaaataagtcacagaatgcattgcaaagaagtggtatagaaaaaatatgctacaagaatttgacaaaatacatcaggaattgatgggagtagagctcagagagaagaggcgactagggatgaaatttgagaagtaactagggttcagataagaggtaaggcattcttggcatggagtggaaaagacacctgtcctgagagtagaactttctgttggaatcagaggattatggttatatatatatatatatatgtgtgtgtgtgtgtgtatatatatatatatatatgtgtatatatatgtatatatatgtgtatatatgtatatatatgtgtgtatatatagtatgtatatgtatacgtgtgtgtgtgtgtatatatatatatatatatataggcaaaattaagaatgtttaggattatacatttattctaaatccaaagttaaataaattatgttacccattttgtgaatcactgaatttgcaagttgaaaaagattgagtgatgaacaactttcccttaaaatgttcttgtctctttactttgtgagatgaaggcctacaaatgtaatttgccttattcttcatagactaaaaatagcagattcaagacaatctaggtattttttttcattacttaactgccttttctgagatgattacatctttccaagttatactgcaattcacaaagcaggtttctcaatgaaattcttccatggtgtaagatgattgaggagcagacttcacctcttaccaagggaaaaaaaaatgactgcaatttgaataattaatcatataatcacctgatcacttttgaaaaatgatgttgtggtaagaacacttaatatgagatctgtcctcttgaaaaattttaagggtacaatgcataattgttgactctgtgtgcacagttgtacagcagatctttagagcttactcatcttacttactgaatctgtatgcctttaaaaatggctactatgtgttaatttgtttgctttgaattacctagaaagatttcccttactttgagggaggaggcaggactttactgtggaccagattgaagactgactgaaacagggaagaggctaaagcacctctccataagacacaaccaccagttccgtatcagtttaccactgccatggcaacacctggaagttaccatccctttctatggcaatggcctggaggttaccaccctttttctagaaatttctgaataactaactcacccattaatttgcatgtaattagaagtgggtataaatatgagtgtagaactgcttccaagctgctgctcttagcacactgcctatggggtagccctgctctgcagaagcaatttcaaaactgtaacactgctgcctcaataaagctgtttttttttgtttttgtttttgtttttgtttttttaccactggctcactctcgaattctgtcttgagcgaggacaagaaacatcccaggctaagcctctcaatgtgggggctcacctaccctgtctcaacttcattctctgctttagctttagacacacattatcatatgctaacaacaggctagtaggataggactgttgaataggagctattgcgaagtccattggcacattcataagcaaaagtgaaattaatgtggattacctcatagcccagcactcttccagtgtttctattccaggcaatagcattccatgaaacctccatttcagaagcagaaaaactctggagagaagttccccttggggccagttgaggttctaccatccagagaaagacataaccatctttagcagagtggttcattgaaaatggaacaagggaacacaaactatgcatagagtctcaaagaaaaccagagttgaggacaacttaccatcttccccagagtagacaatggtcacagtactcagggatccttctccttcattattatacacacccactttgacttcaaagggagacagtgggatgatgctttcatttctgtagacaaaccttgatgattccacagatgacactttctccttggaccaggttgtcgagcccactggccggaacatgatgatatatccaaatccctccccattctgcagttcttctggaattgacttgggcagaatgtgatcaatcactgagtatttgcaaaaatattttattaagctactataatgtttattgattatttcacatttcttccatagagacaaatatggatatttattctgtttaatgatgtattaaaaaacacttttatttggaatgccaattagaaaaatgatcccagttaaagatactcagataaatagtttaagttttcagatagaaatataaaacaagctttacatatttatatatttttctttgatcattcataaattataataataaaacagtttaaaagattttatgatacacactcaaatgtggtttgatatgaatttttaaactcagcacaaattaacttcttaactatttatttcaagactagatatgttttcctttcacaacattttaaacaagtttttgtaagacatgtgtaatggaattactgtgaaataacatatgctttaagacacagaatatttctttaaaaaagtataaaagacctcccatcatttttttaggcatacatcttcattggtagtgacatgtgtgcatttttcctcacatgaaagaataaactgttaactctcacaaagatcagattctataaaatacatttcaaatctaaaattactaaaatagcaaaatagaaattggtaatattccccctgtactctgcagatactaaaaattgtaaacaatcacataaacttagcaaattaaaatgaatctgtacttgaatttagaccaacatatctcctgatggcaagaaacttgtattgaaaaatcaatggaatttatttggtttttcccaaggaaaatgctttgcttttttttttttaataaatattctgacagactaataaaggcaacacctgacaggacacagtgcttctagtccctcatgtccacaactccatttcagaggttctctttattcatgggagtccatttattctatcaatcacactatctatcttgccacttggaacccatgtgagcaccaattcacgagcgccagaaccacaggcaccgtcttggtgagtatctatgagggcagaatctctgtactctacggtgactaacagacctggtcaattcctctcacagagtttgcatatgaaacatggtgggtggcaaaacaatgatagatatacacagagcaggcaaaaagtagagaacatggagtagcaggaacagtgaggcaatagaagctaagagaaaacagatgctgtaaattagagagagggcatccaaattagctggcagccaggtagaaaactggaagtaaaggaaatgggaggaactgaggcataagcatgagagactattcaagccggggctggatcagcagaggggttgttgatggttgcctagagctcctgtgcccgagtgcccagagcagtgatgaaccatgttccggttcttcatctgaccttcctgcctgcttgctgagacttttttcctgtcctcattacttcccatgtagctttaaaataaacccccattacccgagatgacctgagctggtctctatttcttgccatgtggaacagtctaacaaatacagaaagtgaaaagaggaagaaaagtgctgctccggacatctggggaaacaacaaagtatttcctcatattaacacttctcttctttttcatagggagactagaagtaaaccagttaattttgaatggcatggaagagatttataagaatcgatgctacttgctagagcatttgattcatttctgaagtttctttgatctcggatttaatcacgatgcttagtcagttcatctacataaataggggagttttgtttttgttagtcaagtacaattagtgtttctcatggtgctctctcaagaaagacctgagtccaacatatgcagattagaggggaaaaaagagacttatttagatacttccctttattcttacatgaacagagagtcaaatgattaaaaaatatatatagttatttaacaaggccagaaaaagagttttctttaagtggagacagtgttcagtaaaataaagaaattgtgaaattctcctgggagtaaaatctatgaaaattgataaactaataatgtaattctcaaccacagtgtctgtaagaaccaaatctttagtacagactaagaatcagcaaaactatgtacttctagccacatctggcatgcagcctggttttgaaaataaaggttttgagacacacccacacctatatgtttgtaagtggtatgtggctcttttgagctacaaaagcagactgagacattagaaaagaggtcatgtggcccacgagactgaatatttttactgtctggccctttaaataaaaagcgtgccaaccctcagtgtaggtatgtatctcttactctatagtgctttatcctgtgtacctaattttatagtaatatttatgagacattcaccacaagcacctcaaacctggaagtatttgggagtatacacattatgataaaataatgtataaacatgcccttaaaaaggaattacccattgctatattctaaaaatttgatattatgtctaggtttttggaaacaaaccaaatcaaaacaaataaacaaaaaatctacatttattgtgtggctctggggaaaacacgggaaagatatttagttcagttcaggcagattataccacagggagcctaaatgaaggataatcattaaagttgtcacttatgaaacgtaatggtagattgtgactgaacttagaacagtcttgtgtcgcgcagtgcctttcaaagtccaacaggtactatttcaactacaacaggagtgacattgacctggggtggcctctctacttccaagtcacttttcaaaacgtagttcagatatactcagttctgatggtgtctttcctgacctccttccaggctgggttaagaccattctgtcctctacgcttctgagcattcataccttttctcatccatttttgtattccactgataggaacagagaagctacctaatagagttcattaaattgaaggaattactacctgcattctggtggctcagattcatcctaatgtatgaatcttctcctaaatatacataacttattccataaagaagctgggcaccagaagaagttggctcagtatctgcttgtacataatgtcaaatatgagtgataaatgggaaaccgatttcactaatttactttctgcaagtatctgcatatcagatatccaccccccacctcctcctcaggaagaaaaaataaacacagaggaagtggctttaatttagtttaatttttaaaaataggggttagtatgctttttctgtagagggccagagagtaaacttaaaaaaaaaattcaacttttattttagattcgggggtacatgtgcaagtttgttgcatggatatactgtgtgatgctgaggtttggggtatgatggatcccgtcacccaggtagtgagcacagtacccattaatatagctagtttttcaaccctcgcccttcctctcgtcactctagcagaccctagcgtctattgttgctaccagatagtaaatattttaagcattgtgggatatatggtctcatgcaacagcaagaaagcatcaatacattaatggatgtagctatgggtggatttatttatcaaaacaggaaactagacaaatttgtctcataggtcatggtttgtgtacctttgccttaaagaaaaaagaacattataaatcgtggaaagacagtattcttttggtaattcatgctcatctctatttaagaatgaatgcatagcatttgggccctcattatagactgtgtacaagcaattgcaacaacagcctgtaggaatttctgaccaaggaggagaacaaaataagttattaagtcaggcaaaacttcctgtacactatgatgataatgcttatttggcctttgatgaatatagaaacctaaataaactactcacaaacaattctcttgtagactcatttgaaagtcagtgttttatgggaaatatgtttggagtagtaggtataatatggttaacttactacttaaggtagatatactcaaggactcaggcccaccctcagccatcacaatgcatgaagacaattgggattgtaatacaggatacagtaaaagaacagaaagagagaaccctgtgttcaaatgcttctctgcccaatgatgtcacttttctaagtctcagttttcttacttgaaagtggtataaccaccttatagcattattgtggggactgaatgatatgaaatgctctgtgtggcacctgaaatcctgtaaatgcttgaaaaaatagggtttccccctctgtctggcctctgagagttccaactctctgaaaacactaccttccattcaacaagtgttcatggagggtggaccactttccaagcactgtgctaggcctataatgtccacatgaaacaagatatccagaggaaagggtgactttcagggcaattgcatctagtttctgacactgtcatttataaccataaagaataacgtctctggttcccagttatctctcatagcctagctatgtgaagtaggctacagcaagaaacacctggtttgcatttcctggaacataagggacgcaggttcatttaactgacaaatgtctgagaaatttaaagtggggaagagatccagacagcccacggtggcagagtgaagagagatgctaagtgggtatgcattgcacttccgctaaacatggagcagggtatgtgtctgctgaggacaaatgtgaaacccatgcaagtgggtcatccatggacagccttcaaggggactctatccacaaagaccacctacaagagagagaatattcactggaagagtctggaaatggaccaccaaaatccaggaactgatacccttcagcagccagttgggtctgcaccaaggaattgcagttgggagtccttggtgggggatcatccagtggccatctcccagataaaaaataaataaaaaaacccagaaaccctaccctatgaaatggcagcgtctgataatttgccatacctagagcacaccaaagtcaaacgagaaatgtaccagcaatccagaccttttcctttctcctcccctaccaacaccaaccttctacagctctggagaatccagaggtaacactgtgaatggggaaagataaattaaagagcagaatggagagaagttgaactgaccacgtattccctttcacgctatagaattcttaggctgaggcactgagatactgaaaatgagaaactttaaattggttgaaagtctaaattctaacgtttatactccagtttgaagtgtacacaccagactgaaatttttaataacgtaaaaaaatgagcctgtatgttaatgggtaataagaatgaccacaaaatctactccatgtgcctaagctttcatctagatgcagggaagaatgagttgatcagaggtgaacagcagggttaggacaagaactattttttgcctacagtctactgggctcaacttattcacaatacaacagtgccacaggtaacaaatcaaacaatgcctaattcatcaagcgataacgaaaatgctactgacccacgctcaatagatactgaagttgtttttcatgtatttgggagaaaattgtgctgagttcgtcatactgtctcaccatgagaaaagttcctaatacctcctctaaataattcatcatcaggatgatgtatttttataccatatttttttacgctctcaatagtgatcaaataaatctttttgtttttcagtttctttctggccagttaaatctcttttcttcaaaataactcagttggacagaaaattacctcccacgtaatgacgagttcagaccgacttcctccacctccatggatgtttactggtgccacaacagggactaaaaataaccaagagaaatgtgggatggcaattattaaagtacgtcttcatcaggaagaattttgtttttgaatttcacttttcaaaatctcacacaggcatactgtgagagagtcttgcatttttaatgaacgtaaattatgtttacacatatccaaatttctaagagagaggacacagttgtgtttgatacatgagcaccctggctccaaaattaattaaaaattgagtaacatcgggtatttgacatcattatgcatcatctactaattggcaaaatgatgttccattcagatggtgacagtgacactgctgatttagtgcctaattatacagttgagctgtaaacaagttactgaggcagtatattaattattttttttcaataaacaaactaaactaatttttccttttattagtcatcaggatatttgaccagttaaaattaaatactgaaaaatatgtaaataaatactcttgttttacaactcctcgttacaatctcaaatctctcgggagagaagaagagggattttcttctaacttttcacttgcaaagtcaggtttttctcctgtcaagaatgcgcctgggataggttctttctatttatttgttgggatgtaaggctctgtggtagaggattcacaaaccagtaattttgatgagttttaaacatctatgcccttcaactctgtatccttgtaaggactaacacaatgaataatagttcatagaaactgtaaaactgaggaaatgctgagtgtgtatatggtattgtagtgcctcacgagaatgaggttttactttacacatgcgtaagtgtttaaaagcattatttttcttgacgtaatgacaaaagtatcctaaatctgtgataatcgctaaatcagcagggtatactttttaaatgtggaattacatgaaattgtctatactggaccatgtctgaacaataggagaggtggttggttgaggaggcacttggatatgtctggggattggtaggcagggattaaaatatgtaagttttaattcctcatttcaaatttttccccaccatatagaccacctaaataaatctagattgcttattttatttatttccatttcatactgatgtttagctctataaacatgaccagaaaatagtcatatgataatctgattgttctttttcaaaattgcacctttcagatataccttttcgtatttaaatttacccttaactttgtcagctttaagcttcataattttttagaaagaagttatgtgaacctaaaccttattttctaagacttccaatgcctttgatcaaaagcgatgtgaatcagagtggattttacagagttgctgaatttatagtgcttgacagcttagagtgactaactgcacactatctcaggatctttgcatagtttagctgtgtaaggaaaagtattttgaattatattttgatttactttctacaaagtttccaatgttctgagaaatagaaaattcctttccctattcaattttaaattaattgtacttaagcctaaaaccatattgagaacaagttgttagtctttgatgatgtcagagacagagagggagagacgagagactcagtaggttttcagttagtagagtttgactcagtgggtatgaatatcaccagtctcattctgctactgaaacaagagagtattaatggttagaaggtggcacacaaactttgctatgaaaatgtaagagtttctgtcaaccctgtccaaagctaccaaaatataaatcaactgtaaacaaacaacctgaaactaaagctcatatccagagtcatggacaacacctgaagattctgatccagggggtatataggagggccggggaatttctatatttacacactttctttggctaatctattgctcatctacattaagatcctcttttatggagaatgctgggtgtaaaaatcaggaggtttggattcaaaacctagctctgtcacaaacaaccagctaatatcctggtgttcattttcctcttctgtaaaacaaagggatttcctctcagctgtaagcttctagcgtgatttaattggatgatatcactgtcaagtatgtcctttttctagccccaattctatgataaacatataacattatctttagtttaaggattgatttattgacttctgacaattgtgcacactttaataaggtaatttgtgtttgttaaattaagctagccatgacaagtgatcctttgtttatgtgatcgaataagaatgtgaactttgtgggctatatacagctagcagattaaatgtcaccctggatgtaaaagtttgagtggaacaaagaggatccattgaaaagagcttaagaaggcatggtatctgatccaggttcttgcgttctgctgttcagtgaaccaattaatgctcaattagtgcccctgttaaatgagcttaggatttacctcatttgcatggaaaaaaatttatactactgctcagtgaagctacaactagttcagagttgagaaatagatgaaaatatatggctgactgcaccaacagagtctcagttaattcctggctacaacattttaatgaaacaagcagtaactcatttgcatatacaaatctacagattctctaatgaattttgactagaaaatagatgcgatgcaaacacagtttcctaagaactctgattttgacatgttggcttaaaggtaatcatttcttattgaacctactatttggagaaaatacaccttgccttgtgtatgtaaaaataaaagaaaatgagagccactcgtttactgccaaacaattttgagccaaaagtattagaagacacataaaaatacttgttttgttttaagaactgtatcatacgaaatcttccacacttttagaacacattgattctttacctgatgctttagttcttaacaattctgatggttcacttggttctccaatcccaatgctgttgccggcaacaacacgaaattcatattccacccaaggactcaaaccaaccactgttgcattgtatgtcttaccattgagaatttctggaactaaaaagaatgagacactaaggcacctaggttgggactactcaaaaacaaataattgtacaaaattatataattattaatttaaaatgtaattgcatttattaaaattattggactaaaatattatttttaaagtgacccaaaacacttttgtcactcacctgtagcaacagcctgccaacccacagaaaatggtgtccgagtctgaatagtaaatatttgaatgggactgttattatctgggcctgctctccaacttagttgagaagtagtactggaaatgtcttccacttgcacatcctcaggaggacctggtggaccttgaaaaaaatgttttatcatgactccattggagatacttacattcattaatttggtactaggatggtttatttttacctgttgtgcttaggaagtaaaatattgaccataatgtatttatagcacattattagcgataaagttctattaattccctttacatggtaaatgacattaatgtagtagtgcttcctctggagattagaaaatatcaggcataggatgattgcatatcaacctatactcaaagattgagaaccatcatctttaattcctcttaaaatctaactcaagtaattgcagctaatatgaagaactacaggagcatgtggatttgactctggattgacaagaatgatttattataaacagaaggtatgtctaagttttagttactgacaccgcttgccaagcgtgaccgttcatgatagtcaaatcctacacagttccatgtctgtattcacacagttccatgtctgtattcacactacccataccatggagtcctggggtttaaaaaataaaactctatctgattacatctcacttccataacatggtgtggtttctcagaggtctacaatttagatatgaacactgtaactgtgaagaaacaatgtgatcactttttcaccatttatgcttacctctaacaatgatatcggctactgcagataaactttctagggttgtttgtactgtgcagagatattttcctgaatgatgtaactgaatattccttatcatcaaatccccaacagattcctgcagacagaaagggagaaatggataaaaacgtaagcccatataacaagtcctactttattgttacagctggataaatacgaaacataaaacaactctgaaattaaaagatatactagtatcattgtcatttcttgtatctaaacccttttattatcccccttattataattacatctagaaaacaagtatttctacggaagacacgaaacaaaataaaccaaaacaaaaacaaatgtagcttcaaaaacagtcagtgattatccatgcaaataaagatggagagagtaactatgaaaaatggtgattcatgtaaaagacttgattcattttattaagcacttaacaatttcagtaacttactcctccaatcctttcaaaatgagccactcctttttttaagtctatgacatct

SEQ ID NO: 557 - DNA, 107 bp, Homo sapiens
tcagttgcctacctataaaatgaggaaaaagtcatatttatgttttcataggttttgttcaagattgaaagagattattaataataagtgtccagtacacaccttaa

SEQ ID NO: 558 - DNA, 107 bp, Homo sapiens
ttaaggtgtgtactggacacttattattaataatctctttcaatcttgaacaaaacctatgaaaacataaatatgactttttcctcattttataggtaggcaactga

SEQ ID NO: 559 - DNA, 12477 bp, Homo sapiens
agtgatggaggagagaagatggcggaagcggagtgagtgactagatggtgactgatgtcgtaactagggggggcgagttggggcagcgacacgttcccccaggggaaagctcagggctcttttgcgggcagtgtggggaaagagagactcgagacccgtcctatcgtggaggagccggctaggcccgtgtcgcggggcgaagacgaactctagggtccagttaccctccaggcaggagcgccccttccgccatcaggtcccggatctgcgcggccctgcgcgcagggtcacccttgggactccgggagctggggttttccggggaacgagcccgggtgggctcctcaggcgctgtcattcctgcaagtgggccccgcgggcagccttgttacggctgcctgcgcaggggcccgcggaggctgggtagggcagggcgggcactgccaggcctccttcgccttcttctccttcccgccccggcgccaccccactcctcctcagcgggagaatccgacacgcggggctgcccgcttccctcgtgccggaggcatcccggcgtgggcctgagagcggcgggggctgcttgcaggtctggtgaggctgaaaacaccctgaaagaaaggtctttccctcgattctctgggtgcagcgttgctgcctcacacgcgggccacattcttgtgtgtcggtgtgacggtatgtttagttaacgactccagaacttactgtttcctgggtaggcctcttgtgcaccagaactgctggctgtattttgcaggtattagtatgcctagacggtggagttaccaaagttgttcttttgtgccaggcctcgaaatgcagtgcgatggtttggccagttccgctcaaccgatgtttagacttatgccgagaatttggattctctgtgaccatttttggttaggagttagaactgtttaccatactgtttggattggagggcatagttgagcagattaacacttttaaaaaaccagaacttaagctggccttttgcatgtcactggtacacgatacggtagtagtatgacaggcagcagttcggtaaaaagtttaccttacctaccactaatactgtataatgttgaacagttaccatatgatgctgtgatttgattggaaggcagtttggaaaaaaaaaaaaaaaacagaagcataaaaatgtatgaattatttactaatccaaaaagtaagtgaggagtcagctttcttcctgacggttttcctttcacttttcctcttattttctttttctttctttgtgacagcgtctctcactcttatctcccaggctggagtgcagtggcacgatcatagctcactgcagcctggccctcttgggctcaagcgatttccccaccttagcctctcaagttgctgggaccacagtcctgtgccaccaggcctggctaattttttatttttcatttgtagagacagggtttccctatgttgcccaggctggctttgaacgcctaagctcaagcagtcctccccctgagtggtaggatgacaggtgtgaaccgccactcaaggcccccacttttcctttttttttttttttgttcggtttttttttacatttggttcctcagagaatataaatactgtttacatacgtaatatagaacaaagaaaatttgtacttaaaaaagcaacgctatggtaatagtgtatgtgtaccaattagtgccagattcatttgttttttcatggaatagaaagtgttcttacatttttatcagtgctgctaatgtggggtgggtgggatttagtttctcagaagaaaagaccgataagaaaagggagataaaaccagtataatctcttgtgtgcttttcaccttcgaggtacatttctggcccgacaaaaactactgctcttctggtttctaacaatatggaggtccttagaattgacttaaagtgtttgaatttattcaaatacagattctgtatttagtggaattttgtaccacaacaagtaagattatagtattggagggaagaaagtctggtataaaagtgtactttactgtccatacatgaggaagtgacataatttatgttttcaaaatctggagtaattctttgtgaaaaagattttgtaagggtatgggaagttgctgtttgctgcttctctgtgttctcacagcaatctgctaataagtataactcagctattagaagtagtaaggacagcgttgtagactgattaggggaaaagccagtgtgagttaaaaaaattactttttaacattttttaaaaagaacttatttttaagcaaagtttatatggtaaactaaactaagctagttaacatgagtccctaggcattctgttctaatgtataggtaagaatgactttagtttgtaattagtgtggtcaaaagaatgtaaagaaatgttttaaaatactctgatactgcttaaatttttattttcctaggtagtttagtattctctcattacctgttttggtttaaaaaaaatctttcggtaatgcaaagataaacttttggctatgcgttatctgagttacgtattctgaatcatttgaattcaaatgtagtaggtattaactattaaatatgctccatatatgtgaagtatttttcccttctaagtgcttatagtgactgtgtgttggctgtcttttatgagagccttcctagcagtttagattactgctgattatttctttggaatgaatattctttaaagctcataagataatgcttttaccaatacaaacactttgtgtgacctgccagatttaaggaccatagtacagctatggatactgaaccaaacccgggaacatcttctgtgtcaacaacaaccagcagtaccaccaccaccaccatcaccacttcctcctctcgaatgcagcagccacagatctctgtctacagtggttcagaccgacatgctgtacaggtatttcagctgtagtgatgggtagtctaagacttaagatgtcatattactttttgcttaagctggatttatgtattgtttcatattctcaaatgtacagttagaattactaatgtttcaatcaactgtctcaatccattttgtgtggctatagcagaataccaagactgtgtaattgtaaagaaaagaaacttatttcttacatttctggaagctgggaagtctaatatgaaggagctggcatctcacgagggccgtcttattgcctcattccgtggtggaagactagagagcaagataccaaatttgcagcctcaagcccttttaaaatttcctttagtcggccgggcgcggtggctcacgcctgtaatcccagcactttgggaggccgaggcgggcggatcacgaggtcaggagatcgagaccacggtgaaaccccgtctctactaaaaatacaaaaaattagccgggcgcagtggcgggcgcctgtagtcccagctactcgggaggctgaggcaggagaatggcgtgaacccggaaggcggagcttgcagtgagcggagatcgcgccacagcactcccgcctgagcgacagaacgagactccgtctcaaaaaaaaaaaaaaaaaaaaattttcctttagtctattcatgtgggcggagtccttatggcctaatcacccttcaggggtcctacctcttaacactgttgcattggagattaagtttccaacacatacttaattgggggacacatttaaccacagcaacagccaacaaagttaattaataatcatactattggctaggcgtggtggctcacgcctgtaatcccaacactgtgggagaccaaggcagggagatagcttgagcttaggagttggagactggctgggacaacatgttgaaaccccatctctacaaaaaatacaaaaatcagcagggcatggtggcatgtgccagtggtcccagctactcaggaggctgaggtgggaggattgcttgagcccaggaggtcaaggctgcaatgagctgtgatcgcaccactgtactccagtctaggtgacagagtgagaccctgtctcaaaaaaaaaaaaaaaaaaaaaatgctgggcgtggtggctcacacttctaatcccagcgctttgggagaccaaggctggcggatcacttgaggtcaggtgtttgagaccagcctgatcaacatggtgaaaccccgtctctactaagaatacaaaaattagccaggcatggtaatgcatacctgtaatcccagctacttgggaggctgaggcaggagtatcacttgaaccctggcggcagaggttgcagtgagccaagatagcgccactgcactccagcctgggcaaaaagagtgagactccatctcaaaatatatatatatagtattgagagggcttacatttgtcagcatgtagtttataggattatgtgtaaagaaaattataaggggaaagtctctaggtgctgctacagtatgaaggcattcaacctagagccccaacatacagaatggttgtagctttattttatattggaactcaaaatatagacttagggagatctgttcaggtatgtagatatgttacgaagtttatattaaacccaggtggcctaagaaccctaagcaggaggatccattctaaataccttaggggcagagggggaagggaatattgaactaggaagtcacttagttgagaaagtaaagtttacttagttaacatttatgataatggaggttggggcaatatggtattatataaaaagggcatggaccttccactctattatactttgtttgaattccattttcattatctttaggagctatatagccttgggtatgagacataatccccttgagcctcagaaaactaaaatgagggtgagactacttctttcattaattactctgaggattaaatgaagtatctttgagattaatgaagtatctagaactgtgtaaggcacattataggtttccagtagatagtaatagctaatacttattgaataattgctacgtgccaaacatttgataaatgttacatgaattatctccattaatcattaccagccctctgtgaagtagctattattattatctccattttactgatgggaaaataaatgttttaaatcagctaaataactttcccaaactcacctagctagttctcagacttcagcccttgtgcccttaaccactctgtgaattcttattttttctattatacctgctttcttctggtagaatccttataattgcatccaccctgaaaacaactgcttgcaatatagtccttcctctgctccatttttccatggtggataccccagtataatgtctatttaactgtttttggtttaggatttagttttccaaaatcactgtggagtggaaccagccagttcaccagaaattcaaacttgaatgcagagtgaggttttaatgttttttacctttctctgaggtaagggatacagggaaaaggatttagatcttttttttttttttttttttgagaccgagtctcgctctatcgcccaggctggagtgcggtggcgtgatctaggctcactgcaacctctgcctcccaggttcaagcgattctcctgcttcagcctcctgagtagctgggactacaggcacgtgccaccacacccagctaattttttgtatttttagtagagatggggcttcaccatgttagccaggatggtctcaatctcttgagctggtaatccgcccgcctcggcctcccaaagtgctgggattataggcgtgagccactgcgcctggcccccccctttttttttttttcttctctccctctgtgttgcctaggctggagtccagtggcatgatcacaactcacgaccccctgggctcaagtgctcctcctgcttcagcctcctgagtagttgagactacaggcacatgtgactatgcttggctaatttttttattttgtagagacaggatctcactatgtcgcccaggctagtcttgaccttctggctttaagctctcctcctgccttagcctcccaaagtgctgggatgagccaccacgcctgactgataatgtgatcgcttaatataccattttgtcctctagttttcaattaagctgcatagattaataaaaaattaatagaaagatatgtagatgtagatatatctcataaatagcactgactctgtttcttatgagaccatagaattgcttctcccaaaatgaaatcaaatcaatatttattgaactacctaagtaattctttaatcttccagcttgctttttctgtcctgggaattctcttcaccctccttgggtgaataagaatttataataaataagaacaatttgctgtatctataacttgtatttactcattgctgtgagtaattgaatagtagtgaaagactgtgctgacaacagaaaaaatgagtatactctgacaaaagtatgtgtcaaatagattgttatttcagtttgattttagaatttttttccgtatacagtccagtgcttttagaattttgttatggaattagaagaacaaatagagattgatctgactaaaaaaggtatattgttataattctgaatcacttaatgctggcctatagtcccctgcaggtagaggtcaaaagctcccattgattttgtgacagaaatttgtatcaggcatagtagtctatagttggagaggtgagatattaacacatgaaaataaacaataacacacagaaatatgctgtcttgaagtttagataaaaggattcatggcattatggctcaagatgtcctgagagaccctcaagctataggattatggcactattactcccttagctctttgaaaactctggtttgatgctgcgattagggttctgtgctgtttcagagtcacagtgagcacaatgtgactttcggatttggttgtataggattgacttattctgacttaaccttttggagaaatgtaagaattttctctgattttagtagagtacttgacttttctatatttatttatgaagtttcaggctcagattttacattttactaacaaatattcacagtaattaacactttttaaggaattaagtaagaatagttttattcaatgttgaagcaaaacaaggtatttgacatttaaaaattttttaaattattgagtaattttctaaagaagaaatagctttataattttattttttatttttattttattattattatttttttgagatggggtcttgctctgtcgtctaggctggagtgcagtggcatgatctctggtcactgcagcctccacctcctgggttcaagcagttctcccacctgagcctcctgagtatctgggattacaggtgcatgccaccatgcctggccaagttttgtatttttagtagagacagggtttcactatgttggccaggctagtcttgaactcctgacctcaggtgacctgcctgccttggcctcccaaagtggtgggatcacaggcatgagccaacctgcccagctgctttgtaattttatatgattattaataatacctgctcattgtaagattttcagacatctatagaagagtatgaagtagaagctaaaaatcacctctaatctagctacccatcagtggtctttgaaagttttcctgtggattctttcaaatattttaatataaaaatggtatcttactctatatactattttgtaacccactgattttctttttgttagtaaatatagatcggtatcagcaatgtacactatagtggccagtagttacttgtggctgtttacattaaaattaaaattaattaaaattcaatttaaaattaactcaattctttagttgcactaaccacattttaagtgctcagtaggcacatgtgactagttgttactgtataggacagcactgatctacattactatttgttatggttgcatggtaaaggtattctctccacacccaagccctgaattctacgaagttttatccaaaaaggttatgccaacttgaatttttactagcaatatgggagtattggtttccccaggtagtagtagtattcttttaaatctttatccatctgaaagttggaaaacagtatcttgttctaatttgtaagtttttgactactggtgagattgaaaatcttttgaaatgcttagttggcctggcctgtcttttgcgaattgtccactgggttttgttttgttttttttttctttgagatgggagtcttgctgtgtcgcccaggctggagtgcagtggcatgatcttggctcaactgcagccttcacctcacaggttcaagcgattctcctgcctcagcctcccgagtagctggggctacaggcatgtgccaccatgcctggctaattttttgtgtttttagtagagacggggtttcaccatgttagccaggatggtcttgatctcctgaccttgtgatccgcccacctcggcctcccaaagtgctggaattaacaggcgtgagccaccgtgcccggcccactgggtagttttaatgtgtacaagttagtgatttctagtgatatgtaactaggaaagaaataatgttaataagcttgatgatattatgtattaaagcagtgaaattttaaactgccacttttttatactttgattttctgattaagataaaggttgagattatggtttgacattggttcaattgacttatcacaggtaattcaacaggcattgcatcggccccccagctcagctgctcagtaccttcagcaaatgtatgcagcccaacaacagcacttgatgctgcatactgcagctcttcagcagcagcatttaagcagctcccagcttcagagccttgctgctgttcaggtaagactaaaataagagtttatgagatcaaagtttctgttatctgtaggtagttactgaaaataaatagattgggtattatttcagagttctcagatgtcctgtggttatttttcccggaggaaatatattaataggttgccgaatagaagttaattgagaaaaaggggatatgtttttttatgttactctgtttctagcttttgtctcagtgctttttatccagattgaagaaatgctatgctagtttatgtgtataaagttctaggtacaacagtgagtacttaggcttacataaattgtatttttactaaaaataagattaaaaaaattatataagtaattatactcattaaaaaatcaaacaatattaagttgtttataagagataaagtaaagctgttccttttccctgtctatcactgtttcccgttcttcaaaggtggccacagtaacaatctaatacatatttctccagaaattttttatacaaagataggtatatccatttttctaaaatccaatcatattattcctactgataacaggatttcattattaaatgcttgtttttaaaaaagatttttgttactattgtactatttaaataaagctgtgtaagatttaatcttaaatcccctcaccagaggaggatctcaattgactgaacctgaaaaaggtttatttctgttaccaacagattctcagctgttgcttcttagtagtgtaatttttaaataacatgtttgtgatacaagttaggaaactgaaacccactcactggctcttgctgtagctctaatttctttttcataactctggagtagtgattccactttaaagatgacagagacccataaagtgaaactgacaataaagtagctaataaaataagattagtctttggatcccctgttttcaccattcagcttttccttatttaaaaaatctgtttaaccgaagcttaagccatgttgactataaaattagttgtttcatacataggccttttgacatttattgttgtggttttgtgttatcatggtaccagaaagttcttaacttcaggtttttaccgacatattctaaaagtcttactattttaggcaagtttgtccagtggaagaccatctacatctcccacaggaagtgtcacacagcagtcaagtatgtcccaaacgtctgtaagttccctaaatttttttttcctggatttaaaattttaaagaattgttttccaaaagtaaactgttgttatttatgaagctgttattataatttgttgcatgctgtttaaagtaacaattgcccagaaatagaaatgataaaattcaagaattcagaactaatgttaaacttatgaaaatctgagtcttaaaaaaatctttttgtattatttcttgtatatccatttgcactgatcatgttcagatcttatgtggtttcagctttctgtgtgtattgaaagcctaaaatatacaatgcagggatattggccatgaatttactgtgatatacaatagtatgtcatgtccttggtagacatctaagcatttctaactttgtgcaattcacattttagaaattatactttcagcttacatgagttatttgggttcaatttgcaagtatccattcaagatagggtaatttattttgagaaaggagtaaaagaaagctgattcgctatattgcacatatatattgggaaattgtgccaagtttcccaggtaaaataaatttatgggcatggtaatacttgtttagcttttaattttggtataattttaaactgcaataataataaaaaaatttctgtatctactctactcagattaatcaattattgcatattgccccattactttatcattcattcttttccactacatgtatacatatttttttctgagtcatttgtaagttgagatatgttcctttattcctaaatactttgatgtgtatttcctaagaacaaggctattgttttttgaagccacagaaaaattactaaattcaggaaatataacattgatacagtgcagttcattttcacatttcatcatttgtctcaggtttcccaacctcatcactatggacattatgagccagataattctttgttgtcaggggctatcgtgtaatttataggatgtttagcagcatccctggctactagatgccggcagcttgtggtctttctccttcctctagtgtgacaactataggtgtttcctggtggggggcaaactgcctgtagttgagaacctaataatgtcctttctagatattttttcctggtccagaatggtaatactttgatacttcataaaattggctccaatacaatatagtttgtaggttgttaaggaattgaaggttaaggaattgtgctctatttcttcagctaagggtatggtctttgctaactacatgctgtggtcagcatatagctgtggttttttttgttgtttggtttttttttctggctgttgatctgactttttttttttggcgtgggaatgtcctggagtgtgaacaagattagtttaaaaagttccctatgacttgaagatgttagattaaatgaaaaacttaaataatgtaacctagctcttaagcattaatactggagtttttgtcattgacatcagatgtctttaatacaatggtaattaaggaaaggagtggtaaatattttgtgggctactgaaggaaattatatagacaaattctttattctgtgaaatactggaataacaataggatgtatttgtatagatatgttattttgaatttttttccttcatgttattaaaaggtatctttttaaactgtctttcattatggctttatgtatgtgacattcacagaagttagaattctagtgattgtgcttatatatatgacattgttaatgttacttgtcataaaccagcagcattataccatgaagtatgccaaaagctgtaaatggctggtgggggaagataagtaagtaggaagaacagattcccagtaaaataaaggaataatacattacatttgctttatttactatccgttgtgagcttctgctcaagtaatttgactagcagtaaaaattacaatgcccaaggtaacttagtaaatttaggtcaatatccaaaaacgggggggagcatggtaacagatctcttaagtagtgatgataatgagccatcaggtaacagactagtagttttcagagttttgattattttgagttaggtttccagataacagtgaagccgtgggaaagggtccattctccagaagaaaaaacagctgtcaggtaaccagctaggtagttggggcttagagtaggagtgggatcccaatggggaaatggaatattattttaaaaatcaagtccaaagtccagtcataccacctgggggaactgtgtacctactgattgattattcctaatatgaaaacccgaaatgctctaaaatctgaaatttttgcacaccaacatgacattcaaaggaggagtgttcattggaacattttggattttggatttttagatttggcatgctaaaccagtttgtatctttccaaaatctgaaaaaaaaaaa

SEQ ID NO: 560 - DNA, 169 bp, Homo sapiens
ttttttttttttttgagacggagtctcgctctgtctcccaggctggagtgcagtggcgtgatctcggctcaccgcaagctccgcctcccgagttcacgccattctcctgcatcagcctcctgagtagctgggactacaggcgcccgccaccgcaccctgctaatttttt

SEQ ID NO: 561 - DNA, 6573 bp, Homo sapiens
ttttcactgtgtaagcaagatcttctccatcatatttaggcttaaaaccatatccctggaaaaggaaaaaacaaagtcttcattcgatgtctaacaatagaaatatgggcaataatgaatatgtgaaaagacccgggtttctcttcatcttctactatgtgcaatatgactaatgctctgttgagtggaatcctcacctcgatgcttctgtcttcagtgggtagacccggaaatgcttattgaacatttggtagaagatgaagcaggccacttagtctcagtaaatatagtagccaagagaagacgatctttgtgttgagggaagagtttatagagttggagccaatggtaacttcaccatcagtaagctatcccaagaacagagatttcccagagacatcgtgcaagagctgaatagaactgtaagtagttaacatatttaacttgcctttaacacatggttgtctaagtaaataattgaagggttaattgtgctggcaggtgaggatgtcacttaggtttgggatggctatttccagcactagtgacaatgctttacaaattttccgaacgttatcattttttgaattaaaaaaattgagatataattcatatactgtaaaattcaccatttcaaagtataaaatctaatggcttatagtgtattcacaaagttgtgcaactttcccctaattcctaatttcagaaaaagcctgtccttttttgggtagcagtcacttccctccacctatctactaacatacttcctgtctctatggatttgtctatatccatataaatggaatcatataatatggagtcttttgtaactgggttctttagcataatgttttcaaggttggttcatataggtcatcaaggttggtttcaaggttgtggcatatactggtactctttttatggctgaaaaatattccattgtatggatacaccacattttgtttatccatctatctgttgatggacatttgggttgcttccactttttgactattatgaataatgctgctatgaacatttgtgtacaatttttttgtatgaacatgtgttttcaattcttttgggtatatacttaggggtggaccaatgccatttttgacccatattccttcaaagtagctctgaaaatctatgaactatatatagatttaataatagaatacaccctaactcctggtcagctagcctctaggtaataggatgtcagtgatgtgtaactagattcaggctgtactacagtttcacaggaaacttttaaaatcttctgtgacaccttgggaagcagtgtataaatacagttagagaaaggcagacccaatatttcctcatcttttagagctgcttagtcaagaaggctgtggtgatcttcccctcctcatagtttccctaaaacagatatagttaaagtgcagcctatgtggttccaaagcacagacagacatatatacacacacacaaataaaacaaaacccccttcacatcaaaagaaaagacagagttttcaggctgggcacagtggctcaagtctgtaatctcagcactttgggaggctgaggtgggaggaccacttgagcctaggagtgtgagaccagcctaggcaacatagcgaaactctgtcactacaaaaaataaaattagccaggcatggtggcatgtgcctgtagtcccagctacttgaaaggctgaggtgaaaggattgcctgagcccaggagttcaaggctgaagtgaactgagattgtgccactgcactccagcctgggctacagagcaagaccctgttgcaaaagaaaaaaaaagactgagttctccatcatacctaacctctcccaaacagtaacaagccaaggcttcaaaggactgggaaatgagctaactactgtggcaatacttactgtattaggagtggcaatatttattgtattaggattaatgccacactaaaatgtttttttttctgattttttaaaaaattatactttaagttctgagatacatgtgcagaacatgcaggtttgttacataggtatacatgtgccatggtggtttgctgcacccatcaacccatcatctacattaggtatttctcctaatgctatccctcccttaaccccccaccctccaacaggcactgctgtgtgatgttcccctccctgtgtccaggtgttctcattgttcagttcccacttgtgagtgagaacatgcagtgtttggttctctgttcctgtgttagtttgctgagaataatggtttccagcatagcctaccaaccaaaaaaagcccaggaccagatggattcacatctaaattctaccagaggtacaaagaggagctggtaccattccttctgaaactattacaaacaatagaaaaagacggactcctccctaactcattttatgaggccagcatcatcctgataccaaaacctggcagagtcacaacaaaaaatgaaaatttcaggccaatatgcctgatgaacattgatgcaaaaatcctcaataaaatactggcaaattgaatccagcagcacatcgaaaaaccatgatcaagttggcttcatccctaggaatgcaaggctggttcagcatatgcaaatcaataaacgtaatccatcacataaacagaaccaatgacaaaaaccacatgattatctcgatagatgcagaaaaggcctttgataaaattcaataccccttcatgccaaaaactctcaataaactaggtactgatggaatgtatctcaaaataataagagctgtttatgacaaacccacagccaatatactgaatgtgcaaaagctggaagcattctctttgaaaactggcacaagataaggatgccctcgtctcctattcaacatagtactggaagttctggccagggcaatcaggcaagagaaagaaataaagcgtattcaaataggaagagaggaagtcaaattgtctctatttgcagatgacatgattgtatatttagaaaatgccatcgtctcagcccaaaatctccttaagctgaaaatgttttaaatacactatttaaaatccatatttgcacttactgaagtttcttcctccatctctaaaatgtaagaaattccttcatctgatggtgttcctgagggcttactccattgtaaggataaccaagtaattccagccttggttaatacaggacttgctggcatagaaggagcacagcctgaggtgtaatataagacttcttcactaaaaccactgttgaaacaaatggttttaaaaggcatgaaaaagttatttttacagtgaaagaacaagtttgtgacagatgtaatttttttggaaaatgacaagttttgataatgaattataatacaaataatatatcttgggtttgatctctttatgataaccaggtcagataccaaacagtgaattagtgttctattaaaaatgcagttttgttcagatttgtaagcctttatatcataatttatcgagtcaatgaaaaaatatacacattaccttatggaaacaataacactcgtgtattggtgtaaatgttgtaacttttaaacacactttcatataatgccatttatataaaatagaaaatgtaagttctcagttgtgtaattaaacgcacctgcccctaaggtgagcagagctatctctagaacaaaaataatttcaatgactcttgaaagatacttggcctttctatttaaattgggtattttagatgttcttacagttcacctgactttaaacaaaatactgtcatcacatatgctgaggagcaaaagaaaaatctctttgtcacatataaaaatctaatttatatctgaaaatcttggaaagttgtaagtttaatgtttcctgtggttcctatgtaactaactctcttatagcttttgctagactggtaacacatcttaactatatcaacaaagagataaactaagcagaatttttaatgaataatttggacagtaaataattatacaattgacgttgacttgataatctaaaaatatttacattcttttataaagtacaccttaccttgtaccatagtcatttctggccgatagtctgaatttacagcccattgctggtgaaagtttagtaattttaaattgtttctgtgagcccatgtaacactgacaaaattctccatttccttttccctacaagaaatggctgattattatataccatgtacattactgtaaaaagataaattcgcatcaattccttcttgacagttacatattagcaagtgtatactaaaagtcatggatctcaagagaaggctgagatacagcacatcttttatatgatatagatcatcaaatgcagaattaaaacaccagagagcaggtatctttgtacagcttcttgaattaagtaccatcttttagccaatgttaaatctctggctttaataaaggaaactctgcaggtatggaccctacaatctccatagaagactaccagtggtagaaatggggtgacgatctttgatagggtcaactggcggcttttttcaacctatggaaagctctaagcagacagttttaagaaaaggtccttacccatgcccaaacttccaactagatagctcataaacttctttaaaataaaacttttggcgcttctactgcttagattaacactgaaaatgttctagcagagagcacagcccaattacaggcaataagaaggagagagaaaagaggacaactaaagagttttagaaatttagagtggtaactaaaatgggtaagtttcacatttgccacccatttttctttattgtgttgctagagataaaatggtagttagggtgacttctgcttcaaagaaaacctgtagactgtacttgactgctttactaaatgctctttttagttctgatgttgtttagttgattcgactgagtttctaagtagaaaatcatatcatctctaaataatgacagttttgccccgagccagacaccatgactgtactttttgctttggtttcaagtcatactgccttaagtgtaacttctgaaataatgttaaataaaggtagggataattggcaatcttgacttatttcagctttgcataaaaatgcctttgtttagtgatggtacaaaaataactatcaagtaagaaattacctttctattcctaatctgctttgagttttaactgagatgaatggtaatttttatcaaatactcttccttaatttagcaatatagttttcttctaaattaatgtgatatgttaataggtttcctaattctaaattatcttagaatttccggaataaaatctacttggttgtgctttattattcttttaatatactgccgaattcccaacttatcaatggaatttcttccactccctctggcccctcttcttagcttggtacaagccatagggcaagagagaacatggtaactgatagtaaaaacaatgtactaaaccaagcttgtccaacctgcggcccaagggccacatgcggcccaggacagctttgaatgtggcccaacataaatttgttaactttcttaaaacattatgagatatttttgtcatttttttaaaagctcattagctattgttagtgttaatgtaggttggtgcaaaagtaactgctgtttttaccattacttttaatggcaaaaacagcaactacctttgcacaaatgtagtattttgtgtggcccaaggaagccaaaagactggacacccctgtactaaacaatgaagtccagtatgcttgctgtggttggctgagtcatggccaccatgaatatccaggtcccaatcccctgaacctgtgaatataaccttatatggtaggtgggactgtacaatgtgactaagaatctcgagataggagcttatcctggattatctgaatagaccctacatggaatcataagtgttcctaaaaaaggaagacagatttgaagacagaggaggaaggtgatgtgatgatggaaacaaggggagaaaacgcaatgtgatgtggccatgaaccaagtaatgaggacagcctacagaagctggtcaaggcaaggaaacagattctcctctaaagtccctggagagggcctggccatgctgacaccttgattttgtcccagagaaactcattttggatttctggcctccagaaaagtaagagaataatgtgctgttttaatgtcaggtttggggtaatttgttatagcagccataggaaaggaatacacttgtctttaaggctgatgtgaaaaaaaagttcctttatcaaggtagttacctaaataataattttgatggtgatttattgaaaatagggaagttaagtcaggaatgttttctgaaaacaccatcaatccactcatgcaccacacaaaatcattcatactttttttgacagaagaatatacttgatgattaaaacaaacaaaaaagttaattttgcctgaacatatgcacataatgttaaccatttaaaaagattcaatttacttacttcatcccattctaatacaaagttttggattttagaaccattgtcac

SEQ ID NO: 562 - DNA, 539 bp, Homo sapiens
gaaaatcatatttagaaattaaattgacatagcattattataagtttttaaaatgaagctaatagcataaaataaagcataacaattattatgtgctaaataatcaaatttcccattgctaaagacttaagattctcaagaagtaataaaatttctttgctttttaatagtgaaaacaatttacagtggcttttatcatttatttgaaatggtttgattaaataagcactggcaggaaaatttaaatgttgaatttatcaactaatgagcaaagtttctcactgatgatgaaggaagttagaaataaggacaggggaaaactaaaattaacctgtggcactggattagaattgaaggtatctggtgtgaactcatgatttttaaaaatacagagatacagagacacagatatgtatctgtgttgtaattgtctatttatgtatatacacatgtataaatatctgtatataaactaaacatatacacacatatagttcctagctgtgtccattgggagggtgctcaggagcagtaaaacc

SEQ ID NO: 563 - DNA, 510 bp, Homo sapiens
aaattataattttaaactggttagcatggccagaatttgcttgtaagttagggtaatatctcactgactggcaaagtagtggcagttaaaaatgaatataatgtgaacggggcagaggaagaatctttgggaaactccagctcttatgatatagaggaagagaatccaaagagagagatcaaaagtctcagcaggaagtgagggatataaaaagacattttccaagtgttaatgactccagattgctctagtctagttgctgaggtctctcacacttacttgattaatttttctctttttccagtgaggctattaaaatgtccaccttaacctaagactgatcctctagcttttctccaagtttgaggggatactattaagtgtaaagtgttttaccttatctcatttagtcctccaatcaactctatgaagtactattacctgaactttacaaaagagaaaatgagggcttcaaagaaccaaataaatcatcccagatcacaaagtcat

SEQ ID NO: 564 - DNA, 336 bp, Homo sapiens
tttgaagctatggcattcccccactatgagcccacctgtcagccaggctatctgccttgatcctagatgaagtggccattctgcctgcccctcagaacctctctgtactctcaaccaacatgaagcatctcttgatgtggagcccagtgatcgcgcctggagaaacagtgtactattctgtcgaataccaggggtgagttttttcttttaatagttcttctcccttaagcagaagttggttcctgaaggcatagcccttcctcctgagcccaaggtggctttttgagtccagggatagattatccccaaagatctacccactctgtctgcataggc

SEQ ID NO: 565 - DNA, 336 bp, Homo sapiens
gcctatgcagacagagggggtagatctttggggataatctatccctggactcaaaaagccaccttgggctcaggaggaagggctatgccttcaggaaccaacttctgcttaagggagaagaactattaaaagaaaaaactcacccctggtattcgacagaatagtacactgtttctccaggcgcgatcactgggctccacatcaagagatgcttcatgttggttgagagtacagagaggttctgaggggcaggcagaatggccacttcatctaggatcaaggcagatagcctggctgacaggtgggctcatagtgggggaatgccatagcttcaaa

SEQ ID NO: 566 - DNA, 1329 bp, Homo sapiens
gactatgaagagagcccagtgtaccaagtgtacgtgcaagccaaggacctgggccccaacgccgtgcctgcgcactgcaaggtgatagtgcgagtactggatgctaatgacaacgcgccagagatcagcttcagcaccgtgaaggaagcggtgagtgagggcgcggcgcccggcactgtggtggcccttttcagcgtgactgaccgcgactcagaggagaatgggcaggtgcagtgcgagctactgggagacgtgcctttccgcctcaagtcttcctttaagaattactacaccatcgttaccgaagcccccctggaccgagaggcgggggactcctacaccctgactgtagtggctcgggaccggggcgagcctgcgctctccaccagtaagtcgatccaggtacaagtgtcggatgtgaacgacaacgcgccgcgtttcagccagccggtctacgacgtgtatgtgactgaaaacaacgtgcctggcgcctacatctacgcggtgagcgccaccgaccgggatgagggcgccaacgcccagcttgcctactctatcctcgagtgccagatccagggcatgagcgtcttcacctacgtttctatcaactctgagaacggctacttgtacgccctgcgctccttcgactatgagcagctgaaggacttcagttttcaggtggaagcccgggacgctggcagcccccaggcgctggctggtaacgccactgtcaacatcctcatagtggatcaaaatgacaacgcccctgccatcgtggcgcctctaccagggcgcaacgggactccagcgcgtgaggtgctgccccgctcggcggagccgggttacctgctcacccgcgtggccgccgtggacgcggacgacggcgagaacgcccggctcacttacagcatcgtgcgtggcaacgaaatgaacctctttcgcatggactggcgcaccggggagctgcgcacagcacgccgagtcccggccaagcgcgacccccagcggccttatgagctggtgatcgaggtgcgcgaccatgggcagccgcccctttcctccaccgccaccctggtggttcagctggtggatggcgccgtggagccccagggcgggggcgggagcggaggcggagggtcaggagagcaccagcgccccagtcgctctggcggcggggaaacctcgctagacctcaccctcatcctcatcatcgcgttgggctcggtgtccttcatcttcctgctggccatgatcgtgctggccgtgcgttgccaaaaagagaagaagctcaacatctatacttgtctggccagcgattgctgcctctgc

SEQ ID NO: 567 - DNA, 1922 bp, Homo sapiens
ggccgccaagcccgggcgcgcaagaagaaactcagcaagtcagacatcatgctggtgcagagctccaatgtacccagtaacccggcccaggtgccgatagaggagtccgggggctttggctcccaccaccacaaccagaattactgctatcaggtatgcctgacccctgagtccgccaagaccgacctgatgtttcttaagccctgcagcccttcgcggagtacggacactgagcacaacccctgcggggccatcgtcaccggttacaccgaccagcagcctgatatcatctccaacggaagcattttgtccaacgaggtaaggctgaagcgaaaggaccaccatctctcatctcctccatcagaaagcctcctctagcccggcccttgtatctctggtgcactgtatctatttttaggatattagcttatgtgtatcgttgtgggagcagagatgggcggtcaccttctcccactccttcgtgtgtaacctaactttcgcgttgttccaccctttcacatttattttcattccgtccccttggtactttgccaccttggagctccctcctttgctcttccatcctgtcagtcctttcccttctcagtaacctgggcatgaagggaaactgcgtgaagggagagggaaatgtggaggagggacttactttctagcactggcaaaggtcttttttctttgcgtctgtcccaggcattaataaagttggctctattttgctttgtttaacgatgcttttagtcgcgtgtacaagtaagctatagattgtttaactttacacagttgtctaacctcgaattcatgttttagtgaacaagttaccagatccttctcctctgaactcgggttgcaaaaaaagccttcagttcggctctggacagcatttacagacgctcttgaagccgagcgcccacacagtgtgaatttgaatgaagctgcgttggcacaaacccctgttaagagtaaactaacgaaaggcttaaacaattgttgtcttaaatatatctttttagctaataatcaccttcttgccactgttttggataaatcacgctgttggctttcttcataaaagaatttggcttgtcaattctgacttctttttaaaaggatggagaagtgacaaagtcggagggtgggggttggggggagaacaaagttggtttatgtgaaagaaagcttggaccggaaaggtgtgtgggtggtagaggtggggaggcgaatgcagagggcctttggaggggaaaagaatgggggtggtggggggcgggcaggattatgaactcctttcctggcaggttattttatttgagtcttagatattattaattgactttcatgaatatttgtacagctcatttgtatcttaagcacattttgaaaataaacaacaacataattccatgaaatatccaaactttttgcttattgagcgtgctgtttttcttgtgtcaaccagtatgcacctaaacacttttttaagccactgaaggaaaagacagcagaatataaacaggttgactctgttagagacaatagtatatgagctctagccatgaggtcatttgcattttctctttaaaaaacacacacacatttaaagttagccaatttttttttaacctttacaagtgactaaaatgtggatttaagtgtccctgcatatctcccctgcccttacacagcaatcactaggatgaggttttaggagagcttggaaattcataaaaatgtatacaattacttaagctagatatagttcctaacctcaaaagtagactgctagttcaacccatagcattcaaatgctcttgatttatttatttttttcctagactaaacaccagcgagcagagctcagctatctagttgacagacctcgccgagttaacaggtatggactc

SEQ ID NO: 568 - DNA, 509 bp, Homo sapiens
tgtggaggatgacaatgataatgccccccagtttagtgagaagcgctatgtggtccaggtgagggaggatgtgactccaggggccccagtactccgagtcacagcctcggatcgagacaaggggagcaatgccgtggtgcactatagcatcatgagtggcaatgctcggggacagttttatctggatgcccagactggagctctggatgtggtgagccctcttgactatgagacgaccaaggagtacaccctacgggtgcgagcacaggatggtggccgtcccccactctctaatgtctctggcttggtgacagtacaggtcctggatatcaacgacaatgcccccatcttcgtcagcacccctttccaggctactgtcctggagagtgtcccttaggctacctggttctccatgtccaggctatcgacgctgatgctggtgacaatgcccgcctggaataccgccttgctggggtgggacatgacttccccttcaccatcaacaatgg

SEQ ID NO: 569 - DNA, 2332 bp, Homo sapiens
gcacccacgtcttcagggtcacggcgcaggaccacggcatgccccgacgaagtgccctggctacactcaccatcttggttactgacaccaatgaccatgaccctgtgttcgagcagcaggagtacaaggagagcctcagggagaacctggaggttggctatgaggtgctcactgtcagggccacggatggtgatgcccctcccaatgccaatattctgtaccgcctgctggaggggtctgggggcagcccctctgaagtctttgagatcgaccctcgctctggggtgatccgaacccgtggccctgtggatcgggaagaggtggaatcctaccagctgacggtagaggcaagtgaccagggtcgggacccgggtcctcggagtaccacagccgctgttttcctttctgtggaggatgacaatgataatgccccccagtttagtgagaagcgctatgtggtccaggtgagggaggatgtgactccaggggccccagtactccgagtcacagcctcggatcgagacaaggggagcaatgccgtggtgcactatagcatcatgagtggcaatgctcggggacagttttatctggatgcccagactggagctctggatgtggtgagccctcttgactatgagacgaccaaggagtacaccctacgggtgcgagcacaggatggtggccgtcccccactctctaatgtctctggcttggtgacagtacaggtcctggatatcaacgacaatgcccccatcttcgtcagcacccctttccaggctactgtcctggagagcgtccccttaggctacctggttctccatgtccaggctatcgacgctgatgctggtgacaatgcccgcctggaataccgccttgctggggtgggacatgacttccccttcaccatcaacaatggcacaggctggatctctgtggctgctgaactggaccgggaggaagttgatttctacagctttggggtagaagctcgagaccatggcactccagcactcactgcctcggccagtgtcagcgtgactgtcctggatgtcaacgacaacaatccaacctttacccaaccagagtacacagtgcggctcaatgaggatgcagctgtgggcaccagcgtggtgacggtgtcagctgtggaccgtgatgctcatagtgtcatcacctaccagatcaccagtggcaatactcgaaaccgcttctccatcaccagccaaagtggtggtgggctggtatcccttgccctgccactggactacaaacttgagcggcagtatgtgttggctgttaccgcctccgatggcactcggcaggacacggcacagattgtggtgaatgtcaccgacgccaacacccatcgtcctgtctttcagagctcccactatacagtgaatgttaatgaggaccggccggcaggcaccacggtggtgctgatcagcgccacggatgaggacacaggtgagaatgcccgcatcacctacttcatggaggacagcatcccccagttccgcatcgatgcagacacgggggctgtcaccacccaggctgagctggactacgaagaccaagtgtcttacaccctggccattactgctcgggacaatggcattccccagaagtccgacaccacctacctggagatcctggtgaacgacgtgaatgacaatgcccctcagttcctgcgagactcctaccagggcagtgtctatgaggatgtgccacccttcactagcgtcctgcagatctcagccactgatcgtgattctggacttaatggcagggtcttctacaccttccaaggaggcgacgatggagacggtgactttattgttgagtccacgtcaggcatcgtgcgaacgctacggaggctggatcgagagaacgtggcccagtatgtcttgcgggcatatgcagtggacaaggggatgcccccagcccgcacacctatggaagtgacagtcactgtgttggatgtgaatgacaatccccctgtctttgagcaggatgagtttgatgtgtttgtggaagagaacagccccattgggctagccgtggcccgggtcacagccactgaccccgatgaaggcaccaatgcccagattatgtaccagattgtggagggcaacatccctgaggtcttccagctggacatcttctccggggagctgacagccctggtagacttagactacgaggaccggcctgagtacgtcctggtcatccaggccacgtcagctcctctggtgagccgggctacagtccacgtccgcctccttgaccgcaatgacaacccaccagtgctgggcaactttgagatcctttt

SEQ ID NO: 570 - DNA, 2077 bp, Homo sapiens
gctgtgacccgggccacggctagcccaatggggctgttctcttccacaaacacatcaaactcatcctgctcaaagacagggggattgtcattcacatccaacacagtgactgtcacttccataggtgtgcgggctgggggcatccccttgtccactgcatatgcccgcaagacatactgggccacgttctctcgatccagcctccgtagcgttcgcacgatgcctgacgtggactcaacaataaagtcaccgtctccatcgtcgcctccttggaaggtgtagaagaccctgccattaagtccagaatcacgatcagtggctgagatctgcaggacgctagtgaagggtggcacatcctcatagacactgccctggtaggagtctcgcaggaactgaggggcattgtcattcacgtcgttcaccaggatctccaggtaggtggtgtcggacttctggggaatgccattgtcccgagcagtaatggccagggtgtaagacacttggtcttcatagtccagctcagcctgggtggtgacagcccccgtgtctgcatcgatgcggaactgggggatgctgtcctccatgaagtaggtgatgcgggcattctcacctgtgtcctcatccgtggcgctgatcagcaccaccgtggtgcctgccggccggtcctcattaacattcactgtatagtgggagctctgaaagacaggacgatgggtgttggcgtcggtgacattcaccacaatctgtgccgtgtcctgccgagtgccatcggaggcggtaacagccaacacatactgccgctcaagtttgtagtccagtggcagggcaagggataccagcccaccaccactttggctggtgatggagaagcggtttcgagtattgccactggtgatctggtaggtgatgacactatgagcatcacggtccacagctgacaccgtcaccacgctggtgcccacagctgcatcctcattgagccgcactgtgtactctggttgggtaaaggttggattgttgtcgttgacatccaggacagtcacgctgacactggccgaggcagtgagtgctggagtgccatggtctcgagcttctaccccaaagctgtagaaatcaacttcctcccggtccagttcagcagccacagagatccagcctgtgccattgttgatggtgaaggggaagtcatgtcccaccccagcaaggcggtattccaggcgggcattgtcaccagcatcagcgtcgatagcctggacatggagaaccaggtagcctaaggggacactctccaggacagtagcctggaaaggggtgctgacgaagatgggggcattgtcgttgatatccaggacctgtactgtcaccaagccagagacattagagagtgggggacggccaccatcctgtgctcgcacccgtagggtgtactccttggtcgtctcatagtcaagagggctcaccacatccagagctccagtctgggcatccagataaaactgtccccgagcattgccactcatgatgctatagtgcaccacggcattgctccccttgtctcgatccgaggctgtgactcggagtactggggcccctggagtcacatcctccctcacctggaccacatagcgcttctcactaaactggggggcattatcattgtcatcctccacagaaaggaaaacagcggctgtggtactccgaggacccgggtcccgaccctggtcacttgcctctaccgtcagctggtaggattccacctcttcccgatccacagggccacgggttcggatcaccccagagcgagggtcgatctcaaagacttcagaggggctgcccccagacccctccagcaggcggtacagaatattggcattgggaggggcatcaccatccgtggccctgacagtgagcacctcatagccaacctccaggttctccctgaggctctccttgtactcctgctgctcgaacacagggtcatggtcattggtgtcagtaaccaagatggtgagtgtagccagggcacttcgtcggggcatgccgtggtcctgcgccgtgaccctgaagacgtgggtgc

SEQ ID NO: 571 - DNA, 652 bp, Homo sapiens
gaactggaccgggaggaagttgatttctacagctttggggtagaagctcgagaccatggcactccagcactcactgcctcggccagtgtcagcgtgactgtcctggatgtcaacgacaacaatccaacctttacccaaccagagtacacagtgcggctcaatgaggatgcagctgtgggcaccagcgtggtgacggtgtcagctgtggaccgtgatgctcatagtgtcatcacctaccagatcaccagtggcaatactcgaaaccgcttctccatcaccagccaaagtggtggtgggctggtatcccttgccctgccactggactacaaacttgagcggcagtatgtgttggctgttaccgcctccgatggcactcggcaggacacggcacagattgtggtgaatgtcaccgacgccaacacccatcgtcctgtctttcagagctcccactatacagtgaatgttaatgaggaccggccggcaggcaccacggtggtgctgatcagcgccacggatgaggacacaggtgagaatgcccgcatcacctacttcatggaggacagcatcccccagttccgcatcgatgcagacacgggggctgtcaccacccaggctgagctggactatgaagaccaagtgtcttacaccctgg

SEQ ID NO: 572 - DNA, 522 bp, Homo sapiens
ctccgaatctggtgatagtgtgtttgcaccacctggcttccacccactctgacccttctaatttacctccctggaaaagcccaagtggtgtccaacatgaggctggggtcattcttccaacagcccgaccccaaggggcatgctggtcagacaacagcctcgctggtggggtggaggggacggtagggagcgagtgggcccggtgactcattgtgggtgcttctctgggattttggaggctttgttgtgttgctcagggcccttttaactctgtctgacctatgggaggggacagcaacgagggcttttatgactggaatgaactggaaacttggcctctgagagcccttaaaatgttttggaaacctctaggcatacttagggtacttccaccatgattatcatcggctgtgtggcttccgatcgctaattcgcaccgggcatctggcgaggccggcctggggaaattgggatggagggtcctgctggagggaatcctggcgctttgggcggaggagtgct

SEQ ID NO: 573 - DNA, 522 bp, Homo sapiens
agcactcctccgcccaaagcgccaggattccctccagcaggaccctccatcccaatttccccaggccggcctcgccagatgcccggtgcgaattagcgatcggaagccacacagccgatgataatcatggtggaagtaccctaagtatgcctagaggtttccaaaacattttaagggctctcagaggccaagtttccagttcattccagtcataaaagccctcgttgctgtcccctcccataggtcagacagagttaaaagggccctgagcaacacaacaaagcctccaaaatcccagagaagcacccacaatgagtcaccgggcccactcgctccctaccgtcccctccaccccaccagcgaggctgttgtctgaccagcatgccccttggggtcgggctgttggaagaatgaccccagcctcatgttggacaccacttgggcttttccagggaagtaaattagaagggtcagagtgggtggaagccaggtggtgcaaacacactgtcaccagattcggag

SEQ ID NO: 574 - DNA, 362 bp, Homo sapiens
aaacttttataacaaaattaacatcaaaaggtatatactttttaaaaaaaatttacttttattgatgtgtactcttcctattgatgagttaattccataaatctctacttagtttaacttattggatcaaattatcttcagcatgtatatctggggaaaaaaggtccgaattttcacatttatatttaaacttcaattttttatatttaaacttcaattttttagcaacagctgaatagctttgcggaggagtttaatagttacacattcatgctaatatacatttcctttaaacatccacaaattcttaaaaagattgaatcagtaaatttcatttcagctaaaaatggagtctaatatat

SEQ ID NO: 575 - DNA, 1083 bp, Homo sapiens
ttttgtttactatgcataaaagtctacaatctaattaatagcaatactagatgtttattattagaaaagatgctgagagtatttatcaggttttacaaagtcattttaagaaagcaagatactgatgttaacagaataacatttttggggaagctggctccctattcatggtattttaagagatcatttgtatattatttatcacactgttgtaatgatgttttgagatacttttataacaaaattaacatcaaaaaggtatatactttttaaaaaaaatttacttttattgatgtgtactcttcctattgatgagttaattccataaatctctacttagtttaacttattggatcaaattatcttcagcatgtatatctggggaaaaaaggtccgaattttcacatttatatttaaacttcaattttttatatttaaacttcaattttttagcaacagctgaatagctttgcggaggagtttaatagttacacattcatgctaatatacatttcctttaaacatccacaaattcttaaaaagattgaatcagtaaatttcatttcagctaaaaatggagtctaatatattgtttcaaaagatacatttttacccaccataaatgttacaatatctgaatatgctttgtcaaactatccctttatgcaatcgtcttcatattgtttttatgattctaatcaagctgtatgtagagactgaatgtgaagtcaagtctgagcacaaaaagataatgcacgatgagattgcctaccattttataggatatttactatgtatttatacgttaagacctctatgaatgaatgtatcagagaatgtctttgtaactaactgtttaattcaatctgtaataaaaatctaactaactaactcatttatttctattaaaaaggtattgtcctttaggcggggaatgggaatccttgctgcactgttgcagtcattctgaaaggacctttccctgtacttacctttcaacatgcttcaatcttatcaacgctacattttgtatttttcaaacaagtataaattctgcaataaagagatgtagtttttttttaa

SEQ ID NO: 576 - DNA, 593 bp, Homo sapiens
ggattcaatcatctttattaacctatcatcagtgttacattttatacataatatcttgtattctcaaagggctctactttagtacatcatgttaatagtaaaaagccaagtaagatggctaaacctcaccctagcattttaatatcctccggacaagggaagctagaaagtcaagtcaatcactttatacatgtaagagtagtgttccaaagtaactaagaagctgctacatttttaagcagggaggaaaaaactttcattttggtctttgtgttccagcaaattatactttcaattaacaccaacaatgatatcataaaaaatgctctgcttttaaatttctgaacttcttcaatacaaattaaaatagtactggagtcttttgggaggccaatagctagcagctacattaattggtgtagaggagcctccttatcgataaccaggtccaggttgggtatagccctgaccaaagggaggacggttacgcgcataaggattaggcccacttggaggaggggtcatggtacttccaggaagtgaagtaaaacctggtcttggttgataggccccaggttggcttggagccattc

SEQ ID NO: 577 - DNA, 120 bp, Homo sapiens
tgaagatgactgagtagatactgacttcagggacctctccatggcttcgaccagctgctacacaagatgtgcccaggccagagagtaagtcatcagcaaaactcaggaattctcctggag

SEQ ID NO: 578 - DNA, 4423 bp, Homo sapiens
ggaaccaaattctgccaccagcacaacaattgcagtttactggagcatgaacaaggaagatgtcattgattcatttcaggtttactgcatggaggagccacaagatgatcaagaagtaaatggtaggattgctaacacaaatacaaatgcatatgcatattcatgcatcttcatgtgaagtatttaaatatacacctgtattatgactcttcccacaaagcagtttatagccatttacaaaacaacaacaaaaccccaacaaccatataatgaaataataactacagaagcaaaatttgggaatcaagatcagggaaaacaaaatggcataaatattataatagtcaacacaaatattgtaattgagattcacatttggctttgagctctcagaataacaggagcaatgaagtggttctcatttagagaaaggaggtaacataccagagtttcaaggaaaataaagtttttaacagtacgaaagcctgaaagacaagtgtcacgtgttccacttttagggaagaagccatagagaggacagtgtgctccacaatgacctgaatgcaaatgaagcatgggatgtcatgggtggcagtttctcaggtctgtctttgctaaaagccaccaacaagccacaagattcattcagtgttcacagttcccagggcgtgggcctaggtatggtgtagtcttcctgtgtcccaaattaatgtgtggatagaaatgaaagtgcttagtagggtgaatggatggtatgtcttacagctgagcctctgtaagtatctctcagctcagaaggacttctaataagccctggaagccaggcagtttgaggttgtgcttcctgatgaatcagagctgggagtgctgccattctgtgttgcttgttgaagacagacccacatactatggaaaacagatgagcatgtggcaggcttggcgtcctaactcaggtgcccaatttgtaatcaggaatgaatggtaatatattatactattactaatatttaagtcttttgaaatgtcatgtgataattaatttagaaaaaagtttaaaaaagcaattataggcatggtgtaaagttggctaaatctgtctgtaatgtcatgactcctgttttattgacctatttccatatgcctgtcacagcacaaccaagtaagtgttactatccctatttgcaagtgagaaaactaatgtgaggttacatagtttgctcaaggccttgcaacttgtacatgaccgggggcaggagtcaaacacacatctttcaggctccaaagtttattcttttgtttgtttgtctctgtgtgtgttttgttacaccatacttcatctccatctatttctagctctatttcatggctctctgagacccttcttatcaaaagaaaattgttgcttggcctgcttttttttttttttactgggtttcacccccaccccaaacacttccctatcctgtgtctcattgtttctgtgccctgaactgtgttaataacagttagctaatctgataatctagtctgtgataccatgtcatgtttagtagggtctctagtcacatatgttatgtacactgttaaagggagtgccagggtaataggatgtattagttcattctcacactgctataaagacatacctgagactgggtaatttatgaagaagaggtttaactggctcacagttccacaaggtgtacaggaagcatggcagaggaggccttaggagacagaatcatggcagaaggtgaaggggaagcaagcacatcttcccatggctggcagggaagagagagagagtaaagcaggaagtgctacacactttcaaacaaccagatctcttgagaactcatttatgagaacagcaagggagaagtccacccccatgattcaatcacctcctaccaggctcttcctccaacactgggaattacaattcaacatgagatctgggtggggacacagaaccaaaccatatcataggaccttgcctaaaagaatgattccagtgaaaattgcagacacagattctgggatatgggagaaatattcttcagtgtacaggtccttatgaggttctttaaactgaactttctgtccagaaagtacagctcattggaaaggagagaggcaattgagaagcctgctaagttgaagagctcccgattttcttttaaagaaacagtctgggttcttaagtggaaaagttttgaagatgtgacattcaagagtcataagggggggaaactgaaattaccataggcaaaatttacaaagaaaatcatatgttttaaaggagataaaatttcagtgagaataatcaaattggcccaaattggtaggtttgttcagaatggtattggataatgtttactattaaaatattcaaagtaagatattttttaaaatttttgaaggcaaatgtcttaattggacaaagttacttcttagagtagcttatgacctatcaaagttatttaagtatttctataaattgtggaaatccctagtggaaagaattctggaattcatgagaagaaaccaggatttgaaacctggaaggtcatactgaataccaaaatagtttactaatctgtaaagatgtttaaaaaccatgaagttgtcctttttttatgacatactcttctgaaatattggcactggttcttaagattttcttgagaatgtgttactgagatttaagctaacatatacattatgtaattttaatattcgctactgaaataagttactttaattgtggtatatgaagctcagaatcttactaatatgctattattttctgagaagtgttaacaagtattactatgtcatcctaagtatctcttttcagaatgctgttgctttcatatgtattctaaggagctggttttcacataatggtatctgtaaggttatcagtttgcattttccactgaaagaaaatcatagatgactttctccagtaactataacttttaattaactttggaagatgtcttcgattttaattgtgtcttatgctagagttggtagaagaatacagactgacagtgaaagaaagctactgcatttttgaagatctggaacctgaccgatgctatcaagtgtgggtgatggctgtgaacttcactggatgtagcctgcccagtgaaagggccatctttaggacaggtaaggagatggatgctaagggtgcattagaagacaacgctcagttcttcacagactcttgagatcagccagtaagtgtttattaagcacctattgtgtgttgagtgttgtgcaaagtgctggttatacaacgatgacttaagcctggggtcctgttctcaagaagctcatgctcaggtggggagatggaaaaacagaggatcatagaaaatgtgtggtaagggccatatccagatatacacaggttattatgagaacactccagaggggcacccaagttggcctggggcaggggcaggatcggaactgcttcctagaactgatgcctgcagaaaatgctttaaaggatcaataggaagtaatgcgttaaaggaggatattccacttgaaaaagacatgagcagaggcatcaaggcaagaaacagtatggagtgtgcaggacactgtaagaagtttggtattatttcttagacttaaacaaaggaaagacaagataagaaaggctaacatagagaggccgtgtttgcaaggtaagaagcttgggctgcgtgtgggtgctgggaacccccaaaaggttttaagcagtggtatttaactggaaatgcattctcacgatgaaatcttttcacagggtaagaagcctaaaccaaggctgcactgcctttaagataatggtaacctgcctcaggggaagaaatagtttactcctaccctttatcctttcctcttgccttttaaaacaagcctttattgagcacctactgaggacaagatcatggctaacttgtgtgtactgggacaggggaaagaatctttattttgatttgcttgtatatgtataaagaaagtctagtgggatttttaggaagctactattaggggctgtttggggatgggtgagaactgggcaatgtggaaggcagagaagggagagagacatcaccatctatatttgatcccttttgggtttttaacacagaatacactttctgatgaaaaattgaaaacagaatcatgccgaagccgtggaagatcatgtgcttctcaggtcccaggaaagcaagctggcattgctccacgactgtcctgactctctttctgcagcaccctccacccctgtgatccgcgctgaggactgtactgtgtgttggaacacagccactatccgatggcggcccaccaccccagaggccacggagacctacactctggagtactgcagacagcactctcctgagggaga

SEQ ID NO: 579 - DNA, 10503 bp, Homo sapiens
tctccctcaggagagtgctgtctgcagtactccagagtgtaggtctccgtggcctctggggtggtgggccgccatcggatagtggctgtgttccaacacacagtacagtcctcagcgcggatcacaggggtggagggtgctgcagaaagagagtcaggacagtcgtggagcaatgccagcttgctttcctgggacctgagaagcacgtgatcttccacggcttcggcatgattctgttttcaatttttcatcagaaagtgtattctgtgttaaaaacccaaaagggatcaaatatagatggtgatgtctctctcccttctctgccttccacattgcccagttctcacccatccccaaacagcccctaatagtagcttcctataaatcccactagactttctttatacatatacaagcaaatcaaaataaagattctttcccctgtcccagtacacacaagttagccatgatcttgtcctcagtaggtgctcaataaaggcttgttttaaaaggcaagaggaaaggataaagggtaggagtaaactatttcttcccctgaggcaggttaccattatcttaaaggcagtgcagccttggtttaggcttcttaccctgtgaaaagatttcatcgtgagaatgcatttccagttaaataccactgcttaaaaccttttgggggttcccagcacccacacgcagcccaagcttcttaccttgcaaacacggcctctctatgttagcctttcttatcttgtctttcctttgtttaagtctaagaaataataccaaacttcttacagtgtcctgcacactccatactgtttcttgccttgatgcctctgctcatgtctttttcaagtggaatatcctcctttaacgcattacttcctattgatcctttaaagcattttctgcaggcatcagttctaggaagcagttccgatcctgcccctgccccaggccaacttgggtgcccctctggagtgttctcataataacctgtgtatatctggatatggcccttaccacacattttctatgatcctctgtttttccatctccccacctgagcatgagcttcttgagaacaggaccccaggcttaagtcatcgttgtataaccagcactttgcacaacactcaacacacaataggtgcttaataaacacttactggctgatctcaagagtctgtgaagaactgagcgttgtcttctaatgcacccttagcatccatctccttacctgtcctaaagatggccctttcactgggcaggctacatccagtgaagttcacagccatcacccacacttgatagcatcggtcaggttccagatcttcaaaaatgcagtagctttctttcactgtcagtctgtattcttctaccaactctagcataagacacaattaaaatcgaagacatcttccaaagttaattaaaagttatagttactggagaaagtcatctatgattttctttcagtggaaaatgcaaactgataaccttacagataccattatgtgaaaaccagctccttagaatacatgtgaaagcaacagcattctgaaaagagatacttaggatgacatagtaatacttgttaacacttctcagaaaataatagcatattagtaagattctgagcttcatataccacaattaaagtaacttatttcagtagcgaatattaaaattacataatgtatatgttagcttaaatctcagtaacacattctcaagaaaatcttaagaaccagtgccaatatttcagaagagtatgtcataaaaaaaggacaacttcatggtttttaaacatctttacagattagtaaactattttggtattcagtatgaccttccaggtttcaaatcctggtttcttctcatgaattccagaattctttccactagggatttccacaatttatagaaatacttaaataactttgataggtcataagctactctaagaagtaactttgtccaattaagacatttgccttcaaaaattttaaaaaatatcttactttgaatattttaatagtaaacattatccaataccattctgaacaaacctaccaatttgggccaatttgattattctcactgaaattttatctcctttaaaacatatgattttctttgtaaattttgcctatggtaatttcagtttcccccccttatgactcttgaatgtcacatcttcaaaacttttccacttaagaacccagactgtttctttaaaagaaaatcgggagctcttcaacttagcaggcttctcaattgcctctctcctttccaatgagctgtactttctggacagaaagttcagtttaaagaacctcataaggacctgtacactgaagaatatttctcccatatcccagaatctgtgtctgcaattttcactggaatcattcttttaggcaaggtcctatgatatggtttggttctgtgtccccacccagatctcatgttgaattgtaattcccagtgttggaggaagagcctggtgggaggtgattgaatcatgggggtggacttctcccttgctgttctcataaatgagttctcaagagatctggttgtttgaaagtgtgtagcacttcctgctttactctctctctcttccctgccagccatgggaagatgtgcttgcttccccttcaccttctgccatgattctgtctcctaaggcctcctctgccatgcttcctgtacaccttgtggaactgtgagccagttaaacctcttcttcataaattacccagtctcaggtatgtctttatagcagtgtgagaatgaactaatacatcctattaccctggcactccctttaacagtgtacataacatatgtgactagagaccctactaaacatgacatggtatcacagactagattatcagattagctaactgttattaacacagttcagggcacagaaacaatgagacacaggatagggaagtgtttggggtgggggtgaaacccagtaaaaaaaaaaaaaaagcaggccaagcaacaactatttgataagaagggtctcagagagccatgaaatagagctagaaatagatggagatgaagtatggtgtaacaaaacacacacagagacaaacaaacaaaagaataaactttggagcctgaaagatgtgtgtttgactcctgcccccggtcatgtacaagttgcaaggccttgagcaaactatgtaacctcacattagttttctcacttgcaaatagggatagtaacacttacttggttgtgctgtgacaggcatatggaaataggtcaataaaacaggagtcatgacattacagacagatttagccaactttacaccatgcctataattgcttttttaaacttttttctaaattaattatcacatgacatttcaaaagacttaaatattagtaatagtataatatattaccattcattcctgattacaaattgggcacctgagttaggacgccaagcctgccacatgctcatctgttttccatagtatgtgggtctgtcttcaacaagcaacacagaatggcagcactcccagctctgattcatcaggaagcacaacctcaaactgcctggcttccagggcttattagaagtccttctgagctgagagatacttacagaggctcagctgtaagacataccatccattcaccctactaagcactttcatttctatccacacattaatttgggacacaggaagactacaccatacctaggcccacgccctgggaactgtgaacactgaatgaatcttgtggcttgttggtggcttttagcaaagacagacctgagaaactgccacccatgacatcccatgcttcatttgcattcaggtcattgtggagcacactgtcctctctatggcttcttccctaaaagtggaacacgtgacacttgtctttcaggctttcgtactgttaaaaactttattttccttgaaactctggtatgttacctcctttctctaaatgagaaccacttcattgctcctgttattctgagagctcaaagccaaatgtgaatctcaattacaatatttgtgttgactattataatatttatgccattttgttttccctgatcttgattcccaaattttgcttctgtagttattatttcattatatggttgttggggttttgttgttgttttgtaaatggctataaatgctttgtgggaagagtcataatacaggtgtatatttaaatacttcacatgaagatgcatgaatatgcatatgcatttgtatttgtgttagcaatcctaccatttacttcttgatcatcttgtggctcctccatgcagtaaacctgaaatgaatcaatgacatcttccttgttcatgctccagtaaactgcaattgttgtgctggtggcagaatttggttcctgaggttctaatctaggaggctgtggaactggaatataaacaagttttattgtaactaatgctgtttttattaattttttgggcacaagttacttatgcttgttgaaaaatattcaaagaatacagaaatacatagtataaaagtagaagggctctcttgttcccccaaacccccaaccccaattatatttttttattttttattttattttaattttaactttaatttaattttatttatttatttttgagactgagtctcactctgtcacccaggctggagtgcagtggcacgatctcggctcactgcaacctttgcctcccagattcaagcgattcttctgcctcagcctcccaagttgctgggattataggcgcctgccaccacacctggctaatttttgtatttttagtagagatagggtttcatcaccttggccaggatggtctcgaacttctgacctcaggtgatccacccacctcggcctcccaaagtgttgggatcacaggcatgagccaccacaccggccaatttttttttttaatctgttgagatggagtcttgctttatcacccaggctggagtgcagtggcgcaatcttggctgactgcaacctccgcctcccgggttcaagcaattctcctgcctcagcctcctgagtagctgggattacaggcctgcaccaccacacctggctaatttttgtatttttagtagaggtgggggttcaccatattggtcaggctgttcttgaactcctggcctcaaggattccacccgcctcagcctcccaaagtgctgggattacaggcgtgagccaccgcgcccagctgtattctttagatgcaatcactgttgaatgtgtatccctccacaatattttctatgcatttgtacatgtgcacatatataatacacacagaaataaacaaaaatgtattccaaaatgggatcacttgagaatactcttctacagtcctatagttggagcaataaactcatgtaggttagaggaggcaacaactgacttgcttatccttcaaaacaaaacacatgctttgctagatagccaaggttgtatcattctgtatcaatatagattctatattcacgatagaggcaaatgaaacccttttaagatatagttggtgtatcttcaagccagaaaaatacttgcaaaaataaaatatcaaaatacactttctgaaacgactatcccattttttctttccaacatggctagccctatcaatttttttaattactaactttttaaaaattaaacaaaatatataaaaactacagaaaaagtagcctactgattcagcatacattttagacacctagtataactccgttgttctgaattttaatgacaacaaaatccttggatgttttcctagaaacttgtaaagttcatgattatgcgtacaaacattaatggtatatgcaatgccataaatcaaacttctatgcaattctcccccaaaacttatgacataaaatctttgaacatattttacaaattagaggaaaaggttattcccatagttgaaaaaatagcatgctttttttttttttttttgagatggagtcttgctctgtcacccaggctggagtgcagtggtgcaatctcagctcactgcaacctccacctcctgggttcaatcaattctgctgcctgagcctccctagtagctgggattacaggcgcccactaccacgcccagctcatttttttgtatttttagtagagatggggtttcaccgtgttggccaggctggtctcaaactccttgacctcaggtgatccgctcgcctcggcctcccaaagtgctgggattacaggcatgagccactgcacctgacccaatagcatgtttttacatttattttttatgggttttttttccagtcaacaatttcctgagagataagtttactgaaatattaataatatgggccaaattttatgagattactttattaaaagtggacaccaaaggaaaagaaaaataaagatcagttcagcaagaaggtacaaatgagaaaaacacaaatgggtctaaagaatgtagcaaaaagagacaaactgagaagatgcaacagcgataaagagctgaaaaaatacacagttgtgaaaaacgagaagcagaagaggagaagggtcaagttcatggacttcaatgcagagtggctggcccaaggttaaacaccagatccatcccctctgttatctcagcctcagtttccccatctttaaaatgagaaaacaataataatagtattacctcccagtgtcattataggaagcaaataatatctatcgagtgcttagcaaagtggctgacagataaccagtgctaacattcagaaagcaaaggggccttggcaggagcacaggaaacagaggggcaaggcaggaagctcctgaagatgagggctgaaggagggacccatcatctggaaagccacagaggccacagaggtaagacctgaggagcgaactgcatgctaaggcagaggccgctggtgagagcacctccccaggaactgatcacgggtcagagaccctgatactgtcttggaatttattgcttgtcttcccagcaggaaatggatgtcacattctaaataagtctgtccagaaaaatgtagttcagtaaattttcatgttacccaggtctatgaaaggaccaagcagaatgtttcaaggattgtcgatcatctttgaagcagtatttgagaattacttgaggcatgaacagtgaaaatgctcccccttttatcctatgaattatacatggagctgtatctgctttttaaaaatgaaaacatctttcacatttctctctctttctcgggtaaattaacaaacttaaaaactgattaattgatccaagaaaatcacttaatttcaaggaagaagcaaagtatgtaggttagaaattttgttttaatgtgctccttcccccaaaagcattaaaggtaaaacaccttttttcagaaacaggaaatacttttacttttcaaagaattctaaaatgaaaagggaataagaatattccatagatataatctaataataatggctggatttacaattcttatgtggtagaacaacatcagagacccggagtttagcaactctgtttacacttttacagtaataaacttgaataagtatgatgctggccgggcgcagtggctcatgcctgtaatcccagcactttgggaggccaaggagggcagatcacttgagttcaggagtaggagaccaacctggccaacacagcaaaaccccatgtctactaaaaatacaacaattagctgggcatggtgatgcacgcctgtaatcccagctactggggaggctgaggcataagaatggcttgaacccgggaggcggaggttgcagtgagccgagatggtgccactgcacttcagcctgggcgacagagtgagactctgtgtggggaaaaaaaaaaaggtatgataccaaaaaataccaaaatgaaagtttagggcttcattataagaggctaaggaattgggtagaagaatcacccctctgcctgatgaaatgtgcccaaaaagagccaccacactgggggagttaagcattaaccaaactggactttggaatctgtgaccagatacagatttccactcaacctggcctttggaacgtcctcaggggagcagcattattcacaatagccaaaaagtggaagcaacccaagtatccaccaatggatgaatagataagaggaggaaaagtttcacgttacaacatggtaagctttgaggatattactctaagttaaacaaaccagtcacaaaaagagaaataccatatgattccacttagatgaagtacttagagtaatcaaattcacagaaacagaaagtaaaatggtggctgccacagccaggagaaggggagaatatggagagttagtgtttaatggatatagagcttctgttttgcaagatgaagagttctggagaggatggcagtgatggttgtaccacaatgtgaatgtccttaatgccactaaactgtacaattaaaaatgggcaagatggtaaattttgttatgtgtattttaccacaattaaaaaaaaaatccccaggtgccagcatcaaggaagcctagattcatgtttgtttatcatgatctgtttctctcatctttctcagcagcactctgccttttcgctgtggggcagactctgaagccaaactcccctgccaaacacaccccaaccggctgtgttttcttgaaaatagaacatttttctgttcctctctttcctcacctttcctcacctgtcaaatgggaataacaaaacctacctccttgggttatggtgagattagatgatttgatatgcttaacggtttccacaatgccagccatcgtataagcatggaataaatcgtatgggctgctacttctcattggaaaactcacatccttttctcattgtatctgcttagtttaggtagggggtcatcagatcaacttttcaggtcacaggtgaggacttctgagaggtgtcaccaaatgcacaaaaactacttagcagcaagtcaacaccctgggctccaattttgtgaaacagacgcacaaagtaacatttatggctctgagatcagtctctccataaaaggcttccagccacagggaccgccatgtgcacttgctgagttaattgttaacactttgtgacattttaactctgtgacctctaaaatatattaaacgtcctctcattgcccattaagtattgaaaagcatatcctcctaaatgaacagtggcatataatgaatcccttaaaagcaaaagaccagctctgttaatcaaactttcttagtttgcaatcactgtcctagtctaatccctcttaaagacattacaagaaaacactttgagacatttctagagaaaatccattaagatcaatgattgagtttttaattttataaagggctggtggggttttgggtttttgtgtgttgtgtggtgtcgtgttgtttttgtctttttagacatacagtagcctttttagtagttactaaattaaaactctttgtacaggaatgaatgttaatcatcaatttaaacacaacagccatcttttttgtttttgttttttggggttttttgttgttgttgttgttgtttttagacatgggggtcttactatgttgcccaggctggattcgaacccttaggctcaagtgatcctcccgcctcagcctcctgaatagctgtaatctttgaggtgattttggaagactacagcatcttttaaggaggacacctgagcatgttgtacagtaagaaaaacttggtaacttcactgaaacatggcagctttgaaaaatctaaataagtttcattgtcctgtttgttaaaatagcacattaaaaaatattgtgaagagctggcaggatgcttctgacagccgagtgggaggctcctggctacagaccatggtgctgagctgatagttctctaagctcatctgtttagtttgaaaaaaggggaaaagaactgaattgaagaggggaaaaccactcataaagagaaatctgtttgacacgtaggaaaacatttgacttcttttttcttctatacctggctgctggtatgaggcaaatgagaagagagggagagaaatcctatttttaaattaaagaaaaaaaaaaagaggagaccctttggttccatggctccttccacctcctcaatctccaagcaagtcataaagcttcagatggaaatgcacagaaatgggatgttcctcccatgctcaatttcagagtctagctgtaacattttacaactaatacttttctttttccagttacatgtctttacactcaaaatcttttgtatatatcattacatacaaaacaaacaagcaaaaactgccatatttcatctaggtaattaatatattaaaatgcttaccagccacttgttttaacatctggtcacttcttgccgagctgtcatcataatgttcgaaaagggaaaacgcagcaggcattttctctaaagaagcagt

SEQ ID NO: 580 - DNA, 144 bp, Homo sapiens
aaaaaaattggccggtgtggtggctcatgcctgtgatcccaacactttgggaggccgaggtgggtggatcacctgaggtcagaagttcgagaccatcctggccaaggtgatgaaaccctatctctactaaaaatacaaaaatta

SEQ ID NO: 581 - DNA, 2396 bp, Homo sapiens
cctaactcaggaaactaatagtgagcttgtgtataatgtaaatcggaatgtctccatgatagattggtaacattaaggagctaattacatgtatattatcatggagacatacctgcctctccaaaagcatgaaatatgtaaagagattcttctaggaaaaaagaaatgtgacgctctctcaccaagatgctgaagctgacattcatcaataagcagctgtgcatccactaggcatttggtaaatgttaacttatctaccgaggtggtgttttcttagcctcccacctccttgctgtggagcagcttcatgtaccatgatgcatattcagatcattcttaatactcatattttgatagagaggtttttaggttttcttttaaaccaagtttattgagataaactactttggtaggatatggaacttaggaataatggtatgaaactagacagcttttttttttttattacactttaagttctgggatatgtgttcagaacatgcaggtttgttacataggtatacacgtgccatggtggtttgctgcacccatcaacctgtcatctgtattcggtgtttctcctaattctatccctcccctacccccctgcccccaaaaaggccccagtgtgtgatggtcccctccctgtgtccatgtgttctcattgttcaactcccacttatgagtgagaacatgaggtgtttggttttttcttcctgtgttagtttgctgagaatgatggcttccagcttcatccatgtccctgcaaaggacatgaactcagtccttttttatggctgcatagtatttcgtggtatataagtgccacattttctttatccagtctatcatttgggttggttccaaatctttgctattgtgaatagtgccgcaataaacatacgtgtgcatgtgtctttatagtagaatgacttataatcctttgggtatataccccataataggattgctgggtcaaatggtatttctggttctagatccttgaggaatcgccacactgtcttccacaatggttgaactaatttacactcccaccaacagtgtaaaagcattcctatttctccacatcctctccagcatctgttgtttcctgactttttaatgactgccattctaactggtgtgagatggtatctcattgtggttttgatttgcatttctctaatgaccagtgatgatgagctttttttcatatgtttgttggcagcataaatgtcttcttttgagaagtatctgttcatatcctttgcccactttttgatggggtttttttttcttgtaaatttgtttaagttccttgtagattctggatataagccctttgtcagatggatagattgcaaaaattttctcccattctgtaggttgcctgttcactctgatgatagtttcttttgctgtgcagatgctctttagtttaattagatcccactggtggattttggcttttgttgccattgcttttggtgttttagtcatgaagtctttgcccatgcctatgtcctgaatggtattgcctaggttttcttctagcgtttttatggttttaggtcttacgtttaagtctttaatccatcttgagttaatttttgtataaggtgtaaggaaggggtccagtttcaattgtctgcttatggctagccagtttttccaacaccatttattcaatagggaatcctttccccgttgcttgttcttgtcaggtttgtcaaagttcagctggttgtagatgtgtggcattatttctgaggcctctgttctgttttattggtctatatatctgttttggtaccagtaccatgctgttttggttactgtagccttgtagtatagtttgaagtcaggtagcatgatgcctccagctttgttctttttgcttaggattgtcttggctatgcaggctcttttttggttccatatgaaatttgaagtagttttttccaattctgtgaagaaagtcagtggtagcttggtggggatagcattgaatctgtaaattcctttgggctgtatggccattttcacaatattggttctttctatccatgagcatggaatgtttttccatttgtttgtgttctttcttatttctttgagcagtggtttgtagttctccttgaagaggtccttcatatcccttgtaagttgtattcctaggtatttaattctctttgtagcaattgggaatgggcattcactcatgatttggctctgtgtttgtctattatggttgtacaggaatgcttgtgatttttgcacattgattttgtatcctgagaatttgctgaagttgcttatcagcttaaggagattttaggctgagatgatggggttttctaaatatacaatcatgtcatctgcaaacacagacaatt

SEQ ID NO: 582 - DNA, 1684 bp, Homo sapiens
taaatggtgttggaaaaactggctagccataagcagacaattgaaactggaccccttccttataccttatacaaaaattaactcaagatggattaaagacttaaacgtaagacctaaaaccataaaaacgctagaagaaaacctaggcaataccattcaggacataggcatgggcaaatacttcatgactaaaacaccaaaagcaatggcaacaaaagccaaaatccaccagtgggatctaattaaactaaagagcatctgcacagcaaaagaaactatcatcagagtgaacaggcaacctacagaatgggagaaaatttttgcaatctatccatctgacaaagggcttatatccagaatctacaaggaacttaaacaaatttacaagaaaaaaaaaccccatcaaaaagtgggcaaaggatatgaacagatacttctcaaaagaagacatttatgctgccaacaaacatatgaaaaaaagctcatcatcactggtcattagagaaatgcaaatcaaaaccacaatgagataccatctcacaccagttagaatggcagtcattaaaaagtcaggaaacaacagatgctggagaggatgtggagaaataggaatgcttttacactgttggtgggagtgtaaattagttcaaccattgtggaagacagtgtggcgattcctcaaggatctagaaccagaaataccatttgacccagcaatcctattatggggtatatacccaaaggattataagtcattctactataaagacacatgcacacgtatgtttattgcggcactattcacaatagcaaagatttggaaccaacccaaatgatagactggataaagaaaatgtggcacttatataccacgaaatactatgcagccataaaaaaggactgagttcatgtcctttgcagggacatggatgaagctggaagccatcattctcagcaaactaacacaggaagaaaaaaccaaacacctcatgttctcactcataagtgggagttgaacaatgagaacacatggacacagggaggggaccatcacacactggggcctttttgggggcaggggggtaggggagggatagaattaggagaaacaccgaatacagatgacaggttgatgggtgcagcaaaccaccatggcacgtgtatacctatgtaacaaacctgcatgttctgaacacatatcccagaacttaaagtgtaataaaaaaaaaaaagctgtctagtttcataccattattcctaagttccatatcctaccaaagtagtttatctcaataaacttggtttaaaagaaaacctaaaaacctctctatcaaaatatgagtattaagaatgatctgaatatgcatcatggtacatgaagctgctccacagcaaggaggtgggaggctaagaaaacaccacctcggtagataagttaacatttaccaaatgcctagtggatgcacagctgcttattgatgaatgtcagcttcagcatcttggtgagagtgcgtcacatttcttttttcctagaagaatctctttacatatttcatgcttttggagaggcaggtatgtctccatgataatatacatgtaattagctccttaatgttaccaatctatcatggagacattccaatttacattatacacaagctcactattagtttcctgagttagg

SEQ ID NO: 583 - DNA, 2311 bp, Homo sapiens
  SITE (168): n equals a,t,g, or c
ctgcaggctttcaccagttctcaggatgcccatagggatgggtgaagcctgcctggcctgtcgtgcttccagtggccgtcatctcattaggccccacagtggcattaggatgccctctcggcggtgttcaacgccctcctggtgtcggtgctggcagcggtcctgtgnaagcatgtgcggctgcgtgagcatgcagccacactggaggaggagctggccctcagccgacaggccacagagccagccccagcactgaggatcgactacccgaaggcactgcagatcctgatggagggcggcacacacatggtgtgcacgggccgcacgcacacagaccgcatctgccgcttcaagtggctctgctactccaacgaggctgaggagttcatcttcttccatggcaacacctctgtcatgctgcccaacctgggctcccggcgcttccagccagccctgctcgacctatccaccgtggaggaccacaacactcagtacttcaacttcgtggagctgcctgctgctgccctgcgcttcatgcccaagccggtgttcgtgccagacgtggccctcatcgccaaccgcttcaaccccgacaacctcatgcacgtctttcatgacgacctgctgccactcttctacaccctgcggcagtttcccggcctggcccacgaggcacggctcttcttcatggagggctggggcgagggtgcacacttcgacctctacaagctgctcagccccaagcagcctctcctgcgggcacagctgaagaccctgggccggctgctgtgcttctcccatgcttttgtgggcctctccaagatcactacctggtaccagtatggctttgtgcagccccagggcccgaaggccaacatcctcgtctcaggcaatgagatccggcagtttgcacggttcatgacagaaaagctgaacgtgagccacacaggagtccccctaggcgaggagtacattctggtctttagccgaacccagaacagactcattctgaatgaggcagagctgctgctggcactggcccaggagttccagatgaagacagtgacagtgtccctggaggaccacacctttgctgatgtcgtgcggctggtcagcaatgcctccatgctggtcagcatgcatggggcccagctggtcaccaccctcttcctgccccgtggggcaactgtggtagagctcttcccatatgctgtcaatcccgaccactacactccctataagacgctggccatgctgcctggcatggacctccagtatgtagcctggcggaacatgatgccagagaacacagtcacacaccctgagcggccctgggatcaggggggcatcacccatctggaccgggctgagcaagcccgtatcctgcaaagccgtgaggtcccacggcatctctgttgccggaaccccgagtggctcttccgaatctaccaggacaccaaggtggacatcccgtccctcattcaaaccatacggcgcgtggtgaagggccggccaggaccacggaagcagaagtggacagtcggcctatatccaggcaaggtgcgggaggcacggtgccaggcgtcagtgcatggcgcctccgaggcccgcctcactgtctcctggcagatcccatggaaccttaaatacctgaaggtgagggaggtgaagtacgaggtgtggctgcaggagcagggggagaacacctacgtgccttacatcctggctctgcagaaccacaccttcactgagaacatcaagcccttcaccacctacctggtgtgggtccgctgcatcttcaacaagatcctcctgggaccctttgcagatgtgctggtgtgcaacacgtagcgagcaggccacagcctggcctcgggaaggtggctcctgcagttcagcgtccctgggcccattaatcccactgtggagacttctgggaactatttattgagcaggcctgtgcctccacatcatcttgttgtctctggggtgtggtgtcacagcactcctctttgccctagagataagggacctgacttccccttctcccatcctgaacatttgtacccctggagaagttccttagcagggaggaggaagaggagaggaggaagcaaagaatcacaaggaacctctggctaggtgatcctgatgtttcctactgagtttttctggtatccagatttctggaaaccgagtaatcatgtactgtttgattgggtggttcatctgcttccatcccagtgaaatttacctgtagcccagtgaagggtgtgtttggaacattcattaaatgattctaagcatcttg

SEQ ID NO: 584 - DNA, 2314 bp, Homo sapiens
ctgcaggctttcaccagttctcaggatgcccatagggatgggtgaagcctgcctggcctgtggtgctttccagtggccgtcatctcattagggccccacagtggcattaggatgcacctctcggcggtgttcaacgccctcctggtgtcggtgctggcagcggtcctgtggaagcatgtgcggctgcgtgagcatgcagccacactggaggaggagctggccctcagccgacaggccacagagccagccccagcactgaggatcgactacccgaaggcactgcagatcctgatggagggcggcacacacatggtgtgcacgggccgcacgcacacagaccgcatctgccgcttcaagtggctctgctactccaacgaggctgaggagttcatcttcttccatggcaacacctctgtcatgctgcccaacctgggctcccggcgcttccagccagccctgctcgacctatccaccgtggaggaccacaacactcagtacttcaacttcgtggagctgcctgctgctgccctgcgcttcatgcccaagccggtgttcgtgccagacgtggccctcatcgccaaccgcttcaaccccgacaacctcatgcacgtctttcatgacgacctgctgccactcttctacaccctgcggcagtttcccggcctggcccacgaggcacggctcttcttcatggagggctggggcgagggtgcacacttcgacctctacaagctgctcagccccaagcagcctctcctgcgggcacagctgaagaccctgggccggctgctgtgcttctcccatgcttttgtgggcctctccaagatcactacctggtaccagtatggctttgtgcagccccagggcccgaaggccaacatcctcgtctcaggcaatgagatccggcagtttgcacggttcatgacagaaaagctgaacgtgagccacacaggagtccccctaggcgaggagtacattctggtctttagccgaacccagaacagactcattctgaatgaggcagagctgctgctggcactggcccaggagttccagatgaagacagtgacagtgtccctggaggaccacacctttgctgatgtcgtgcggctggtcagcaatgcctccatgctggtcagcatgcatggggcccagctggtcaccaccctcttcctgccccgtggggcaactgtggtagagctcttcccatatgctgtcaatcccgaccactacactccctataagacgctggccatgctgcctggcatggacctccagtatgtagcctggcggaacatgatgccagagaacacagtcacacaccctgagcggccctgggatcaggggggcatcacccatctggaccgggctgagcaagcccgtatcctgcaaagccgtgaggtcccacggcatctctgttgccggaaccccgagtggctcttccgaatctaccaggacaccaaggtggacatcccatccctcattcaaaccatacggcgcgtggtgaagggccggccaggaccacggaagcagaagtggacagtcggcctatatccaggcaaggtgcgggaggcacggtgccaggcgtcagtgcatggcgcctccgaggcccgcctcactgtctcctggcagatcccatggaaccttaaatacctgaaggtgagggaggtgaagtacgaggtgtggctgcaggagcagggggagaacacctacgtgccttacatcctggctctgcagaaccacaccttcactgagaacatcaagcccttcaccacctacctggtgtgggtccgctgcatcttcaacaagatcctcctgggaccctttgcagatgtgctggtgtgcaacacgtagcgagcaggccacagcctggcctcgggaaggtggctcctgcagttcagcgtccctgggcccattaatcccactgtggagacttctgggaactatttattgagcaggcctgtgcctccacatcatcttgttgtctctggggtgtggtgtcacagcactcctctttgccctagagataagggacctgacttccccttctcccatcctgaacatttgtacccctggagaagttccttagcagggaggaggaagaggagaggaggaagcaaagaatcacaaggaacctctggctaggtgatcctgatgtttcctactgagtttttctggtatccagatttctggaaaccgagtaatcatgtactgtttgattgggtggttcatctgcttccatcccagtgaaatttacctgtagcccagtgaagggtgtgtttggaacattcattaaatgattctaagcatcttg

SEQ ID NO: 585 - DNA, 2314 bp, Homo sapiens
caagatgcttagaatcatttaatgaatgttccaaacacacccttcactgggctacaggtaaatttcactgggatggaagcagatgaaccacccaatcaaacagtacatgattactcggtttccagaaatctggataccagaaaaactcagtaggaaacatcaggatcacctagccagaggttccttgtgattctttgcttcctcctctcctcttcctcctccctgctaaggaacttctccaggggtacaaatgttcaggatgggagaaggggaagtcaggtcccttatctctagggcaaagaggagtgctgtgacaccacaccccagagacaacaagatgatgtggaggcacaggcctgctcaataaatagttcccagaagtctccacagtgggattaatgggcccagggacgctgaactgcaggagccaccttcccgaggccaggctgtggcctgctcgctacgtgttgcacaccagcacatctgcaaagggtcccaggaggatcttgttgaagatgcagcggacccacaccaggtaggtggtgaagggcttgatgttctcagtgaaggtgtggttctgcagagccaggatgtaaggcacgtaggtgttctccccctgctcctgcagccacacctcgtacttcacctccctcaccttcaggtatttaaggttccatgggatctgccaggagacagtgaggcgggcctcggaggcgccatgcactgacgcctggcaccgtgcctcccgcaccttgcctggatataggccgactgtccacttctgcttccgtggtcctggccggcccttcaccacgcgccgtatggtttgaatgagggatgggatgtccaccttggtgtcctggtagattcggaagagccactcggggttccggcaacagagatgccgtgggacctcacggctttgcaggatacgggcttgctcagcccggtccagatgggtgatgcccccctgatcccagggccgctcagggtgtgtgactgtgttctctggcatcatgttccgccaggctacatactggaggtccatgccaggcagcatggccagcgtcttatagggagtgtagtggtcgggattgacagcatatgggaagagctctaccacagttgccccacggggcaggaagagggtggtgaccagctgggccccatgcatgctgaccagcatggaggcattgctgaccagccgcacgacatcagcaaaggtgtggtcctccagggacactgtcactgtcttcatctggaactcctgggccagtgccagcagcagctctgcctcattcagaatgagtctgttctgggttcggctaaagaccagaatgtactcctcgcctagggggactcctgtgtggctcacgttcagcttttctgtcatgaaccgtgcaaactgccggatctcattgcctgagacgaggatgttggccttcgggccctggggctgcacaaagccatactggtaccaggtagtgatcttggagaggcccacaaaagcatgggagaagcacagcagccggcccagggtcttcagctgtgcccgcaggagaggctgcttggggctgagcagcttgtagaggtcgaagtgtgcaccctcgccccagccctccatgaagaagagccgtgcctcgtgggccaggccgggaaactgccgcagggtgtagaagagtggcagcaggtcgtcatgaaagacgtgcatgaggttgtcggggttgaagcggttggcgatgagggccacgtctggcacgaacaccggcttgggcatgaagcgcagggcagcagcaggcagctccacgaagttgaagtactgagtgttgtggtcctccacggtggataggtcgagcagggctggctggaagcgccgggagcccaggttgggcagcatgacagaggtgttgccatggaagaagatgaactcctcagcctcgttggagtagcagagccacttgaagcggcagatgcggtctgtgtgcgtgcggcccgtgcacaccatgtgtgtgccgccctccatcaggatctgcagtgccttcgggtagtcgatcctcagtgctggggctggctctgtggcctgtcggctgagggccagctcctcctccagtgtggctgcatgctcacgcagccgcacatgcttccacaggaccgctgccagcaccgacaccaggagggcgttgaacaccgccgagaggtgcatcctaatgccactgtggggccctaatgagatgacggccactggaaagcaccacaggccaggcaggcttcacccatccctatgggcatcctgagaactggtgaaagcctgcag

SEQ ID NO: 586 - DNA, 430 bp, Homo sapiens
ttttgttttgtttctgttgttgttaatgaacttagaatacagtgtactagaaaaaaaaagctagaatgtatgatacttggtcacggtaattttcatttcctgaagtttggaggtggggagtatatgatatattcatatgtgtgggcccaacctttggataagagtaggccagaagagatctcatgcctccaggaatgaccttcaactaagtaatgcccaacaggagttgatagacatgtatcccagcttccatactatatccagcatatgatcatgggaggaaggctacacatggcattaactgctcattaatgtaccctgtatgtgttggctttggtcccttctctgttctcactttcccattcccctacacgtgtttcatgggataatttctcaaactgttttgattcaaatccttgcccctgactct

SEQ ID NO: 587 - DNA, 430 bp, Homo sapiens; identical to SEQ ID NO: 586

SEQ ID NO: 588 - DNA, 430 bp, Homo sapiens
agagtcaggggcaaggatttgaatcaaaacagtttgagaaattatcccatgaaacacgtgtaggggaatgggaaagtgagaacagagaagggaccaaagccaacacatacagggtacattaatgagcagttaatgccatgtgtagccttcctcccatgatcatatgctggatatagtatggaagctgggatacatgtctatcaactcctgttgggcattacttagttgaaggtcattcctggaggcatgagatctcttctggcctactcttatccaaaggttgggcccacacatatgaatatatcatatactccccacctccaaacttcaggaaatgaaaattaccgtgaccaagtatcatacattctagctttttttttctagtacactgtattctaagttcattaacaacaacagaaacaaaacaaaa

SEQ ID NO: 589 - DNA, 8136 bp, Homo sapiens
atttttagggaacaaatttattttgatttttctgaaaatatcaggaactatgaaaaaacaagctcgatttctggccgtaccaaaagcaaaatacaagtaaaaataacatttgaaaaccaagtttaacctcagagaatcatgttttaaaatacaaagtttaacattctttcctctatggagctaaacaagttttctaaaccataagactgcagtttttttatttttttaactgacgtaattttttaaaagaaaaaacaaaaggggaataaaaagcacttcctaccctggaatcccgtcatttataaaataacatgctcaaatgtcagtgaaaataaacagttgataaacctgaaaacaagtcttttaatgagttcaggttacaaccgaacacaggattttgtaactgggaaagaacagcttgtgtaacaaccgattcttaccaaatacaaataaatataaaagacaatttaaaaacaaactgtataatcaaaatctttccgtaaaatagcagctttcacaaagtaaaaacaatttagttccacagagttgtatgctctgtaggcatatggccaattttcttccgagtccttttgtcttgcactatcaaaatagaatctttgtcttggagcaagtctgctgaagaaggcaccaaaatcctatcctccctattcccctaactgatattaataatcctcttatcaatcattgcaaggtaacttcaatgtcattaagtattaacattctaaatatgtaaagctatagaaggaaggtcctgcctattctctttgcccctctcaaatcattctagtctggtttaccaaacagaaccaccagctaggaggataaaaatacattcccatgttcactagccattaaatgaacatagccacttgtgcaggaagcctaacatttttaggatttcctaactttttaaaacttaaggataagtccatttctacaagctaattttacagctccttaatattcttaatctggacagttaattttgcagactttgttggtgtctgccttttcaattgttttacccaaaaagaggccttgaaaaaactttcaaattcaggaaacccctaaacccctgcagagaaccctcatggtatgtgagtgtgagcactaagttgaagaatactcttatttcacagaaatctaggactgtcagactagggctgagttcattctcttccttcagagacaaaatttcaagctgagcagattcagagacaagggttcctcataggttatatactagtgctgggaaaaggagagaaaatgctatttcattgggtcttgtggttcctccagccgggttagaacaagatttgagagttgcaccctttattttcaaggccaagtggctgcagaaacatttcaagaattcctctggcaaggtggcaagtcagtttccttttagatctaagagtcttgtcgctttaagaaaaatttttttccccagaacctttcagagacttgtccatttgttcatgtgatgaaaaacgtctgcaaaataggctactttctgtagtcatttttcatttccaaagcactcagcaaaagctggctgttttattgtaagtactctggcaattcacctttcaattcaaatatcctgtagagaacgcttcctctgagaagccactggatgtctgtatggtgcaggaggtttatgtgctgtctgtccaggtttttgttttgggtgtttttttttttttttaacatttttgcataaatgggtctttgatacaggtaaccagttttgtaacattattcagaacttcactgtatcttcaagtttttgatatcagcatctctgtggagaaagcagtgtgctataatgtcaacatcaggatttctttttttttttttaataacgcaaaatgacttatggagacaaccactgatggggcaccaggagtgtagataccagacctctggttatcagatatgatgtcacaacattatatattggcctttgttctggcaggctcctagcaatagaaaaagttttctttgaatttcatcatttacaaatcttacaaatgctacagcatgacaaatattagtgaaacctgttgactcatcatcctggatagagaagctgctacttttcagttaatgacacaaaaccttttttgcatcatatgacatatcatcagtaaatcaacttattgagaataaagtctcttcaactttgtactgcatcttgccccagcattttaatgttattagattctcaccaaccatgcatattttcctttcctgagataagttctgctactaaataatttgcttcttaaaccttttgactaaaggtgatttctgaacaaaagccttactgtttttgatagtccaaaagccatttgaaaataatgaatatcctttcttgtcaagtggctgtgatttattgttacaattgctagttttgtaagttgcatgtcacagacaatgcacaatgggacaggagagcttggactgagtccacataatacccttgagaagtagctttctttattaagacagaatttctttgtgtcccttgttgcactagtatactgaagtatactcagaagactgaagttcttcatcaccaaccttttcagaaatgtctgtagttctatgcctaaaatggttctcgtctctctcacatcttgccttccaaaattgcgacactggactgtcagctatattacacacaaatgttaaaaaaaaaaaaaaaaaacagacataaacaagaaaatcacaaaagtacaaaaacttcactaaacaattcacttctaacctacatgatccacatttttgcaatgtttacaacaaagtggcaggcagacagctgagctgtggcatgtaaaaactccttccttagaatgaaaacttccctctgattttctacttcacaggtagttcactcccttaagtcagctggcactgcagaagaggagcctgggagaggccaacatccccctcctatcctcccctctttgcaacagcagcacatgggtctgcctctacgtaataccataaaggctgaaagatccctaaaaaaactgttaacagggctgcgcaatcattgctcactactgtgagaacagcataatgcagcacacaaataaaaaactgtttttagtcacaatttaaggtggagccccagcaacatctcgtagagccccaggtgagaaacccacctccaacaccaaatgacttcctatgagaagtcattttcatttgacttggatccttctgtggcttgacttgcaagttcaggtttggctcctccctcatttaccacctgtggattagacgttggttttgtctgccccagctcctcagtattctctggtacctgctggttattttttccttctgctgtgttgttttggtctgatttgtccgcagattccagtttagcttctttcccatttccctgctttgagttaagctgtgacggatccttagggctcttcaccacctcctggagattgtattttctaaacaacatgtaatctttcacaacactcaggcaacagacagctttgatgatttctactaccactgtgtactgtggattggtgagatccactttattttctgaattgagggtgcacactattcctgtaacaaaaacagaaaaacacatagctgaggaggataccattacatctgatagatacaaaaaatcttttgtctctgtttcttgttaaaacaagacatacagtaatccactcttctatgtggacttcaaataatctgaacccttacaataaataaacacaaatgaaaccctacaacatttaataagaatttttttccaaacaaaattcaatttcgagttaaaaaagacttttatctaactaccagaaaatctcatatccgacatattgaaatcagttgatttaatactattttaagaacattttaatatatttgttctacactcaaaaatgtaagccttaaatctttaaaaagaaaaaaatccttaaaaaacaagtatttaccattgaatgcctatggaaaatcactaagagaaacatacctgccaattctctgataacttcttctctattcacatgactgttatttcgagatttgtacacaatctgaaatgtccctttgtttggagctttaaaccagggttccaaaaatgtttctgcatattttttcatatcttctaaaaaagccttgcatgtgcctgagatgggtaacattcgcaaaataactcgagtcttctttttcttggttttgtacatatcctggagaatatgatgcaccaatttctcaggctcttaagaaaaaaaaaaagttaagaagataatttctcagacatcttaaagatcgaactctaaaatgaattttcactggcaatgacataagttgacagaagaaattctcataatgaattttaaatgaatctacctagtcattctttccaaacagtatttcttcagtgcctaatacgtactataatgtatctaatatattttaacttttcatcattattactgcttgcactagaaatgactgtttaggtagacaccgttgttaacatttttgtgatgtcctgagttatccaaccgtaacaccatgctgttgttttcctgtaacaacagagtacattaaacagtacacacttttttacaaaaaaaaaaaaaaaaaattctgtgagtcactttaaaagatgtaattaatccattagctaagttagcacacaagtctaaatctcagacccaagaggaatcccagaaccatgctgggcacaacatcatgaaagggaggtcctcaggctgcaacttgcctacatacaagtatatttggggctgctccgaaaatttgtaaattagttgaccacactgaaaaacaaaaaaactccagatttcaaacttcttttgagaaattcaaatacctggccctgcattcccaaagagcaacaactggctggagctgagtagcagctgccccttatttacacagaactggcactctagttctgccttaagttatatacgaaggaagcagcaaagccaggtttccactcataagccaatgctacgtccaccaccccattctacctctccacaggccaactgctaatacagtgtacagaagctgccatcaaatgattaactgagtcatgcccaagaagccattttgtaagcagtattccctgagacaggaagatacccagatgttatgagatcgataatcttagcaagtatttgtcacacctatcccaagtgtcctgatgaagacaacgttatttgctccactttccactgactggaatcttcttaacctcatctctgtagatgccttaatgtcaccaacttctttcttcaaggcagcctccgcatcatcatcctctccctcacttccagagggctgctgatccttgtctgtaaactgtttgcataaaactaatgagcagaaatgacacaacagctcacatttaaacactataagtaattatttatgtgaagtccctggcggcaggtggctcagtattgattttttttttttttctaaagatggagtctcgctttgcctcccaggctggagtgcagtggtgcgatcttgacttgctgcaacctccgcctcctgggttcaaccaattttcctgcctcagcctcccaagtagctgtgattacaggcgcatgccactacacacagctaatttttgtatttttagtagagatggggtttcgccatgttggtcaggctggtcttaaactcctcaggtgatccactcgcctcagcctcccaaagtgctgggattacaggtgtgagctaccatgcccagctgactcagtattgataataaagctttttttacgaagctgggacaccacacccttcaaaacgtggagcaaggccggaagtggtggctcatgcccataatcccagcactctgggaggcagaggcaagcagatcacctgaggtcagaagttcgagaccagcctagccaacatggtgaaaccttgtctctactaaaaatacaaaaattagcccgatgtggtggcagacgcctgtaatcccagctactcaggaggctgaggcaggagaatcgcttgaacccagaaggcagatattgcagtgagctgagattgcaccactgcactccagcctgggtgacagagcaagactctgtctcaaaaaaattaaaaaaaaaaaaaaaatgtggaggaagagggaattcccgcagactatagaatgtaaaatttgaaaatgttttcaaaagcatcctgacagtttgaggcagagagaaacgtgctgaccagatcaatcattttagggtggaccttaacacgttgaccaggtatctgtgtgcctcacacgacactgtccttttggtgagattagaccaaatacctgtggaattaaaaacccttactcttgttctattaaggaacaaggcacagaaatacattgttcaataattttggccaagcatggtggctcatgcctgtaatcccagtactttagggggcagaggtgggcggatcccttgagcctaggaatttgacaccagcctggacaacatggcctgagaacccgtctctacaaaaaatacaaaaaattagtcgggcatggtggcacatgcctgcagtccctgctactcggggactgaggcaggaggactgcttcagccccggaggtggaagttgcagtgagcaagagcatgccactgtactccaacctccaccttgggtgacagagcaagaccgcttccaaaaaaagaatttgcttaaagtacaggagtagacaggatatgtgcttgttgcccagctctctgccccctagtgcccaacgaaattgccagtcaggcacaataataattgtatacatttacagaaactttattacataccagtatgtattttatgtacataagcaactcactagccagtcttaaagtattctcttttttatctagctcagcagcatcaaataatgtgcccatgtccgagtccccaagctagtagaggatgagccgtgaatttaaattccctctgtattacccttcttcatttaatccctcagtgtgcgtgtgtgtattggtccagattctaagccagtaatatgatttccaaacactaagactttaggtgatattggtaaaagtttttacgttctaaaatgtattttaagtgcagtaactagcattagtagtaaacctattatttcagaaatattattgcttcaggtaaacacattattactccaacttcacgaggctgtcatgaaaaatgtgtttctgaaagagcttcagcacaccgcctggccctcaatgagcaatccttaagtgggaggtaggccgggctcagtggctcgcgcctgtaatctcagcaccttgagaggcagagacgggaggatcgcttgagtgtagggtttaggactaccctgggccaaacagtgagaccccttatctacaatttacaaaacttagccgagagtggtggcgcgcactcatagtcccagctactctggaggctgagacaggagaagtcgaggcttccctgagctatcatcacgccactgcactccagcctcggcaacagagcgagaccctgtctcacaaaaataaaaataaaagtaatgggagctaccgtggttactgatggcaagaaaaggtgcaagcacttcaagcacaaaaccgatagcaccgaagtctgcgagcgtctcaggactagggacggaaacgccggcgaggccacgcccctacagccgtcacgccgacgacccgaggcgcgcatgcccataccagcagccatccctccacccttccctcctcccgcaaggcctggcagccggcccgcccgcccaccccgggaccggtaccttttctggcccatacatgtcgtcgccgtattcgttgaggaggctgtaggcctcctccacgcacttgcgctcgttcatattgcaggtgatgaggatgccctgtagcccgggctctagctgacggggcccgccagcgtcgcagcgccgagcgcgcttggccagcacatactgagccttgcctttgcgcttcccgccgccaggctgagtagtctgctgggcaggggccgccatggtgtgcgcaaactgagaggaaagagaaacgtttctccgctgctgttggcgtcctcgtc

SEQ ID NO: 590 - DNA, 1644 bp, Homo sapiens
ttttttttttttttttttgagatggagtctcgctctgtcgcccaggctggagtgcagtggtgcgatctgggctcactgcaagctccgcctcccaggttcaccccattctcctgcctccctcccgagtagctgggactacaggcgcccgccaccacgcccggctaatattttttatttttagtagagacggggttttaccgtgtcagtcaggatggtctcaatctcctgacctcgtgatccacccgcctcggcctcccaaagtgctgagattacaggcgtgagccaccgcgcctggccgtattttgtcttgttttttcccctcgcgcatttcccacatagaacagttactcaaaaggcttccagtaaattccatttcagcctcaattttccaggctatgtttctatttcacttaaaaccaaggatgttggctggtgttgtttcatgctgctttcgttgcggccttttatccatagtcttggcaacttatcatgttactgtctttttaaaaatcattgaagatgccacttttgaagaatgtgtttaaaaaacaagtgcttctcatactactcttcaggtacaaacctcttagcagatttgagttcctacaaagccctaaaagatgtaatctgatattttgaaagggacaccgaattcacagtcaataaaccctaggttctaaccccagatctaccactatgtccaaaaattttatcatcttattgtttgcttttacctgtgtattcaatacagcatttaattttcagaatttctttggtggacactgcacagcagagatttctagaagtcctcagttgtttgtgaagagcagtgtcatgacactggcattggccttcccccaaatctctctctcttctgctggctgggtttcagttgcccacactctgccacctgtccttaggatatcaaatattagcatacagataacaagttaaaatatatatatttcaagtcccaagcatatttgagtactatatggaggcaaacttgaaaaacaaaaactcagttttgttaaaatatgtgaggaggcagctttaggctaaatttaagtttggcctaaatcaagcttgtccaacctgttggcccacagtcaacatgtggcccaggacagctttgaaattcaaccggcccaacacaaattaataaactttcttaaaacactctgaggtttttctgcaattaaaaaaaattcatctgctattgttagcattagtatattttatgggtggcccaagaggattcttcttccaaggaagccaaaagattggacatccctggcctacaggtttctccatacatagtgaactataacctaattggatgtgtaaacagactgtaatggctgttgtaacaagtagccaaatctcagccaagcacagaagccatgctcaaccactcacaggtggctgattgttcaaaccatgttttttatttttatgttttttgagacggagtcttgctgtcgcacaggatggagtgcactggtgcagtctcggctcactgcaacgtccacttactgggttcaagcgattctcctgcctcagcctcccaagtagctgggattacctgtgcatgccaccacggccaactaatttttgtatttttagtagatatggggtttcacc

SEQ ID NO: 591 - DNA, 1387 bp, Homo sapiens
ggcctgaggcaggcagccgacctgaggcctgggggcaccgtggacccctatgcccgggtcagcgtctccacccaggccggacacagacatgagacaaaagtgcaccgaggcacgctctgccccgtgtttgacgagacctgctgcttccacgtgagtcagggatggtcggctgggtgggcctggacggctggatgggcctgggctgggtgggcctgggcagctgggtgggcctgggcagctgggtgggcctgagctagggcagcagggcctggctcacgccgctgcctcagatcccgcagcggagctgccaggggccaccctgcaggtgcagcttttcaacttgcaagcgcttctcggggcatgagcccctgggtgagctccgtctgccactgggcaccgtggatctgcagcatgttctggagcactggtacctgctgggcccgccggctgccactcaggtgaggtgctggtcaccaggccacagcccaaggcagagctggcagggaccctgccctatgggccatcggaaagacaggcctgatgggcagcattttcgggggtctgagccccaactcggccagaatcaccctcccgggctgaagcccctcttgctgcccacagcccgagcaggtcggggagctgtgcttctctctccggtacgtgcccagctcaggccggctgaccgtggtggtgctggaggctcgaggcctgcgtccaggacttgcaggtgagggtcacacctgcccacgttgttgtacagagggggggcccgtgctcagccccgagccctgggatgccccttcggcaaccttgccctcccagagccctacgtgaaggtccagctcatgctgaaccagaggaagtggaagaagagaaagacagccaccaaaaagggcatggcggccccctacttcaatgaggccttcaccttcctggtgcccttcagccaggtccaggtgggccaccgggaggcaggggcagagcgagacccagtgccagaccacgatgactgtggtctttctcccccaactccaacctctggcctgtctctgcacagaatgtggacctggtgctggctgtctgggaccgcagcctgccgctccgaactgagcccgtaggcaaggtgcacctgggtgcccgggcctcggggcagcccctgcagcactgggcagacatgctggcccacgcccggcggcccattgcccagcggcaccccctgcggccagccagggaggtggaccgcatgctggccctgcagccccgccttcgcctgcgcctgcccttgccccactcctgaatgcaccacatgcctctgtctccccgctgagcccaggcacttgcccaggccgccctgcaggaccactgcaataaacgccttctcctgcca

SEQ ID NO: 592 - DNA, 1387 bp, Homo sapiens
ggcctgaggcaggcagccgacctgaggcctgggggcaccgtggacccctatgcccgggtcagcgtctccacccaggccggacacagacatgagacaaaagtgcaccgaggcacgctctgccccgtgtttgacgagacctgctgcttccacgtgagtcagggatggtcggctgggtgggcctggacggctggatgggcctgggctgggtgggcctgggcagctgggtgggcctgggcagctgggtgggcctgagctagggcagcagggcctggctcacgccgctgcctcagatcccgcaggcggagctgccaggggccaccctgcaggtgcagcttttcaacttcaagcgcttctcggggcatgagcccctgggtgagctccgtctgccactgggcaccgtggatctgcagcatgttctggagcactggtacctgctgggcccgccggctgccactcaggtgaggtgctggtcaccaggccacagcccaaggcagagctggcagggaccctgccctatgggccatcggaaagacaggcctgatgggcagcattttcgggggtctgagccccaactcggccagaatcaccctcccgggctgaagcccctcttgctgcccacagcccgagcaggtcggggagctgtgcttctctctccggtacgtgcccagctcaggccggctgaccgtggtggtgctggaggctcgaggcctgcgtccaggacttgcaggtgagggtcacacctgcccacgttgttgtacagagggggggcccgtgctcagccccgagccctgggatgccccttcggcaaccttgccctcccagagccctacgtgaaggtccagctcatgctgaaccagaggaagtggaagaagagaaagacagccaccaaaaagggcacggcggccccctacttcaatgaggccttcaccttcctggtgcccttcagccaggtccaggtgggccaccgggaggcaggggcagagcgagacccagtgccagaccacgatgactgtggtctttctcccccaactccaacctctggcctgtctctgcacagaatgtggacctggtgctggctgtctgggaccgcagcctgccgctccgaactgagcccgtaggcaaggtgcacctgggtgcccgggcctcggggcagcccctgcagcactgggcagacatgctggcccacgcccggcggcccattgcccagcggcaccccctgcggccagccagggaggtggaccgcatgctggccctgcagccccgccttcgcctgcgcctgcccttgccccactcctgaatgcaccacatgcctctgtctccccgctgagcccaggcacttgcccaggccgccctgcaggaccactgcaataaacgccttctcctgcca

SEQ ID NO: 593 - DNA, 712 bp, Homo sapiens
aaggagtccgtgggtctgggcagtgcccgcggcaccaccaccacccacctggtgaggagcggctccttgctcactcagtccagagagggcttgaaatccaggctccagagcccagggcagcgaggcgagttcagccccagggatggtttaacccccacagaggcagggcgttgaggaccttcctggcagggaaagtgggtgaacagaggtgagaaggaggccatgcaacaggggctgccccatgggcccgagggagccacagcgggttcttgaggaaggcagggggtaccccagatgccacgttttgggtgggtttggccggtctcacagagcgaagccgacgatttgtgcctgttgggtggcctggcctggaggcggggggtcttgacccatgtcatgcaagggctgcccgggagcccagggctctgatgaggcatgatgtcagcaccacctgccccttgtcccaactcactccaggtgcaacctgatgtggatggcctggagtccagcccgggggatgctcagcaatgggggtgcctgcagctctccctggagttcgactttggaagccaggaggtgaagggccccgctgcgcaggaccagcggttctgcgagtttccggaaagggtgacgggggaagggcagaccccatgccctgggtggtggggagctgacagggcaggggcccttggctgagcccaccccgctggct

SEQ ID NO: 594 - DNA, 2855 bp, Homo sapiens
ggcagcacgcggccaggccaggcggccggacaggtggggaggtctctgtggctctccacgcccccattggtctgaggaggactctatgccctttctgagcaggggcccagcctgggggaggccatttatacccctccccctgggcccaccagcccaactcgccgctgccggcctgacctcgctcccagccctgctgcccagattctaggtgaggcccagcccggcccgccgaggccgggggacagggcgtggctcgagctggtttgagggaggacttcctggggcgggggtctgggggcctgggggatgccaccagcagccccctttggggcctgcacgggtccgggagtgagaaggagaggctttggggaggcagctgtagcgagaggcaggtattagacactccctgaccaccaggcttcacctctggggaccctggaaggagagtttaggggtcaagaagccccagaacctgagcccccaggccaaactgaggagggatttcttccatgcacttaggcccaaagccaaagagagagggttaaaaataacagcgtcactcaggcggccacctgcgctggcccatcccaccctccctcggggacagctgcagctcctcaggctatgcctgggacattttgggaacactttctcctcttacttctcaccctggggaattccaagacattgtccttgaaggaggtgagagtagggggaggaggtgagagtagggggtgggcgggagggggctgtcatcaggagccctgaacccctcaccacctacctgatgggcacaggcatcacggtggcaagggcctggccaacacctctgtcttcctctccccacaggctccaagctcaggacctcaggatgggagagtaagtggtacccctgtacccccatacagtgaccctgcccacctcctgccctgtccaccccatcacacactccgaccccgccagccatggccctaacctctgtcttctctccccgtcctgcctgcgtcctccctccctggacagtgaggaggtaagtagttgctgggggctcaaaacatgacgaggagggggctcccccaactcagcataggtcataggtcacagcctcaaggccctaaggcccagagaagatggcctggccctccccgctggcaaaagtgccccacccacccaccaagacgctgctgaaagagaggaagtggctgccccaagccttctggggcaggggaagtgtggctgtggcctggtcacaggggaatcacttcttctttctgattcctgcacttcccgcccccacctcaccggccgacctgcccccaactggccctcctctcccccagcctctggcctcccagcaccatgtgccacctggcaaagtgtcacacaccacacagcaccatgtcccagtgcaaggtctggggccagggaggcccagcctgcccatcatggcctcaggagcccccaggctctgctggtcccggagccggagcccctgacctggccagggagcgtggaagggggtgggggtgctccaggcctggaggccctgactcgaccccctgtcccctgccctgcagaagcggaacagggccatcacggcccgcaggcagcacctgaaggtaggtgtgggctcccgggggggtggcccaggtgggtctgcaggggagctggctgcagcccctcaccgcctgccccaccgcagagtgtgatgctgcagatagcggccacggagctggagaaggaggagagccgccgtgaggcagagaagcagaactacctggcggagcactgcccgccgctgcatatcccgggctccatgtctgaagtgcaggtaccagcccctccccggccaccccgcctccccagcagcaggcctgcctgctaactcagtttccccacttgtcaagagggccagtggggtggtcagggcaggggcaggtgaccgtggctgccaagtgtcaggacggccgcccgcccccacacccacccctaggagctctgcaaacagctgcacgccaagatcgatgcggctgaagaggagaagtacgacatggaggtgagggtgcagaagaccagcaaggaggtgagtggtggcggcgggccggcggcaggcgggtaggcggtggcccagcgggcaggcggggcgggccggggaggccgagaccaccgggacctcgggctcccacccggctcccctgcccacagctggaggacatgaaccagaagctatttgatctgcggggcaagttcaagcggcccccactgcggagggtgcgcatgtcggccgatgccatgctcaaggccctgctgggctcgaagcacaaggtgtgcatggacctgagggccaacctgaagcaggtcaagaaggaggacacagagaaggtgcgtgccacggggggagcaccaccacacctaccctgccggggaagcacctcccacacctgccccgcctggggaccacctcccacacctgccctgccgggggccctgtaccactgcccctccagggtgccatgcaggggacactccactgcccaatgcagagggtaaactgaggctgaaggtggtgtggaccagggtgcgtgcataagtgggtgagcctgagctctctcctgccctctcctccacaggagcgggacctgcgagacgtgggtgactggaggaagaacatcgaggagaagtctggcatggagggccggaagaagatgtttgagtccgagtcctaggccactcgctgcccctacgcctgccccggtgcccggctcccagcagaacatactagggagatgcacccagagcctgccagggagggctggcctcaccaccaccgtcaataaaggatttgaatccccatg

SEQ ID NO: 595 - DNA, 13046 bp, Homo sapiens
gtccccgcctcccagagaaattgaaggatccagaaagaagtgcttatagcagggaatgtctcccctcacctcctgtatgaacatctctctccttcctccagtataggagggtctgcaaagctaaaggaagagttcctttgttacaagatagaaaagtggtgccactttaaagatgatttctcagtgttctccttagataccaaatacaaaggacgagggatcaagctcagcgaaagtatcaggcatttaaggtatcaggcagcaatgcggggaaaggtgaattttcttcaatcagcataggatggttagggaagagcatttatcactttggttcttatccttcaagccaggggaaaagcaacagtgaggacatcagagacaaaagcatttatagaactaacaaacacaaacgtttgacaagtgagaaagctttattaaagcacacatacatgtcaggggggtgggaaacaaaagagcaagttacagcccgggatcccaagttatgccttccattacaatgtgcaatccacaccaaatcaatctttgaaaacattcctccattcggttcatacatacagtagaaaccactgtggcgtgcccttaatccagtgtgcttataggaaatcagttagcagctgactctgttgaaagggatttcctctctgctatacactccttccacacacaactttgggtagaaacgcttatgagaatagaaaggtcagtttgatcaatgagtaccagaagatgaaacttagctcactagacccttctttgaaaagcctcacacactacacccatgtaatatgtaggtcaaatttaggaaacaatagcaaaaacaggaactgaaagctcatcaagcaggaagtcagaataacagggagactctgtctacattcccttagagcccttaacagtccccagcctggagaaacactgggccaattgagataacacttggctcttctggttgacacagtgggatgtagaccatgctctgtttgataacacaccccagacgcaaacactaagacagatgtggtacatgaggatgaatatatctcatctttcattcgagaaatgaggagctctctctccaatgactgcagtatcagtttaaaatgcagaaaattcagcatgggctgtgagacactttaccctcagtcactctggtcctctgagatcagctagaagctctcactgggcatcctcgtgatttagtcaaaatacattatctaattaaagtgcttttcaaaagcagctccattataagagtcccccaaaggtctagtaaagatatctagaactggaaaaagcttgggaattctgttagcatttcaaagaaaagcattagaccaaagcaaggtggaaactgcttaaaaactagaaaagttaaatttaaaagccaagttccagaagtttatccaggtagaaaataagttaaaagcataaattggagaggagaaagaggaaggaactactcacctctccccaacattcctgtctttactaaccaaccctgcttcccagagccttaaaacccagactggtcctaatgcgaaaggtagccagggcttcctagggaagtaggaacaatgatagcaagacagaagataaaaagttgttttaaaagctgtttttaagttaagtgaaccttataaagacataagaaaaaatggactctgaaaataaactagattatacacagaaacattttaaagaaatgcttattcttgagactgctttaaaaagaagaacaagtctgcatcactctagccagcataatgagatttgcagaaaatacatgtttgtacacatacacacacacacacacacacacacatacacacatacacacatacacattaaattataaatctttgctcttgatttcttcacttcctctgacctgccctcgccagggctggacctgcagaagaggacagggactcataaacccagcttctgcttggccattgaggaacggagctgcagagtcccttctgcccaagaccctgggtactgtcgcatcttctgccacaggctcacttcttccccagtcgagtccatccagtccaccacttccccattactgatccctgaggagaaacaccagaagaggctaaagaggggccccactctcagcccaccagggaagatgggttgtacagcaagattagccaccccataacagtttcctacgaagatgggctaatggccacagcagtctgggaagtgctccctcacctgtattcctgagactctgtcaagagactctgggttgatgaaatcagactccaaatggcacacagtcactagagacttcttattctgaggctgttacagagttctagtgcctgacaactcatgccagagctattgccaactgtacttaaacatttttcttttattattattattaatttgagacggagcctcgctctgtcgccaggctggagtgcagtggcacaatcttggctcactgcaacttctgcttcctgggttcaagcgattctcccgcctcagcctccagagtacctgggactacaggcctgcgccaccacgcccagctaatttttttgtatttttagtagagacggggtttcaccatgttggctaggatggtctcgatctcttgacctcgtgatctgcctgcctcagcctcccaaagtgctgggattacaggtgtgagccaccgtgcccggccaacttttttcttttaaagctaaacacctctcctctagctgcagactccaggtcagaagtgaggatcgtatgtggccccattcatattctcttatatattcatccattaattcagcaaacatttattgagtgcctactgtgtgccaggtactcttctaggctctagagacactagtaaacaaagcagaaaaagtctctgtcctcaggcaactttcatttgaatagggaagacagaaaatatacaagcaaaccaataagagtatttcagacagtgaggttaacattatgatgtaaataaacagggtgatgtatagtgactgactcaggaactactgtgcagatggagtggtctgaggactctctgagaaggtgacatttgagccaagacctgaaggataagaaagaaccagactttccattcagagaaaacaataattgcaaaggttctgaagtgggaatgagcttggtatatttggagagcagaaagtcattttggttgaagcatagtgagcaaggggaagagtgatacaagacggatcagaaaggaacagaggacccaggttacacaggggcctgtaggcatgttaagaactttggattgttttctaagcacaacagaaagccactgaggggttttaacaggggactgacatgaattggcttacatgtgtaaaaacatcagtctatatgcttcatgttaaatattctgtgtgattattaatatataagtatattaatagacaagtgcagagactagggagagggcaaagaagaggatccgagactaagctctgccaagcaccaacatttagagtttgggtatagaatgcagcacctacaaagaaaactgagaaggggtgagcagtgacttaaaagggaatcagaatgcagtgtcaatagaagttcagcgtttcaagcgaaaaggagtgatctagcatgttaaatagtgctgaaaattctagtgagatgagaacaacactttggcaagagcaactgctcagcagagtggtgggacaaaagccagatcacagtgaaggagagctgaaggagaggtgagaagtggagacaattctttctaagaaactagaaggggaacgtgtagtcaaggaaaggtttgtttttgtttcataagattggaaataccagagcatatctgtattcacccctggtaggtagggaggatgaaactgagagatgacgattatagaagtgaggtcatcgagaagggtagggggaggtggcccagagcacttggagagagcttggcttttgctagcaatgacccttctttcattattaacagcatggaagatggaatgtataggtacatacatataggtaggtttgtagatttttttggtgggaagattatgaagttcctggcaatcagggtcacatttatctgtgcacatatcagtgcatgagctcagccttcccctagtcctggcacatagtaggcactcaataagtattggctgaatgttaactgaaaggaaagaagacaactgtcatcacagaggagctttgtgttggggggcgggaatggtaataggagtaaaatagacaagaagccttcaaacaagtgaggatgggggaggggatctcaccagtgccaacacccagcctgacccctcccaggaagtcattgctggccaggggctcccggtcccacacagtcagttccaggcacatatgctgtagatcttccagcctcacaccattgtagacaaatgtatggttgtagtgaggattcagggtcttcttcatcacaggagttttacgtttactggccttgttcctcatgggaaggaggtatctggcagagggcggggagtaatcaacagcctactcaaagcggacagttatctctctaaattcccctttcccctaccacaggcctagcccaagaagatgaacccacatccagatcctactacacacgcccctccttgaatctgctgaagcagagttcccactacctctactagatcattcacctgattcaattcctttaacctagagagaaaatgaatataatagtattagtgaggctattctgtgctccactgaaaatgggtttaaatattgtgggcttgtgtttctactagacaattcatctctttaaataaaaccaatagtaatatctataaacttagccaaacatgatttctagataaattaagtcagtaggtactctgtaattttcggaaagcttaaaaactgtgggaaacaaagccctgagttcccaaaatctagacagtcagaagacacagattttcacccagaattaattaagaacatgagtcagacaaaagtcagaacctgtctgcagccctcctctttggattatcaagtctacagcccagaccagtgcaaaggtggtgaaggttttgtcattacctaatttcaggaacaaatttggttgccgggagtggtaagacacactggataatatccacagagaaagttaaattcttctcttagctctcttgttctgaaactggttaatttggggctggtctagggactcaccccttgacaaagctgtctgaagtccctcctgctttggcagccgtcaagttcttggcttctttgatccacacctggagctctcccccttccccacctttacctgtaagggatgtcagccatagcaagtgagccccttccacctctagatttatcttgagctttgtttatgcagcactttctttgcttgctcctaaaggcagcgagctccataacagaaccgtgcctgtcctgtctcctcagtgcctagcacagtgcctgccagtaagcaataggtgctgtattaataacaaccacaatattaataaatgcctattgaaaactggctatgtgccagataccatgttaagcatttaattctcaaaacaaccctaggagagtcacactatttttgtcctcattttgtacatgagaaaattgaggcttagagacataaagttgcctgatatttgttcaatgatttaaaaaagagggaactcctccatctgagttctcgattccacccctacttcacaggactcttcagacatcatcaatttcaatcctcacctcccaatttaaatatctctttctccacttgtcccttcccctcagtctaaatatatactaatctcatctctttgaaaaagtacttctaaaagaaaagctccctttaaccttatctcttcttcaagctattctccatgtctctactttctttcaccatcaattatcctgaggaaaaaaagtccacacttaccacctctacttctttgcccattcactcagcctagtttctagtgaaatctggtttctgctttcactgatccactgaaaatgcaatctaatgccaattggccatgtcttctcagacctcatctggtctgacctccctgtagtatttcaatactgttgataacctccgccccttcttcttgaagctctctcctgataaccttttacttcactggtgtttctttctctcttcatcctttaaaatgttgctgatctctctggttctatacttgcctctcttctctagtcatgctacataccctcattggggatttcattgattcccccaaaccttctagatgtgactctgccaaaggtatattttttcaaagaacgtaggccacacattgccaagggatcaagtgaaactctttatcattaagttcaaggccctcttcagtcaggctcccacctcatgtccaactccagccccacacctacatctagtgtaccagaactccagtcccactaaaataagggacacactcacatacaaccccacattaccatgcctttttaaaacctttgcgcatgttatcccctcttctgaaaatgctcttctctcctcatcctgctccttttctgtctggtaaagttttaagatccagttttaatgttacttcttcaaagctctcccaaatgtaaccagacataattcaccactcctatatctgtgtccttttagcacatgactgtctttcttgcaaaaacttaagctcctcaagggaaagcaaatatgttttactcatctacacaaccgtagtcactaacacagcagctggcatgttgaattactcttccccagctttcaacttcctgtccttcatactttaccacctctcccagccacccttctcagccccaaagtttctgttctcttctgccctcttagtagcttgccacagctggaccaagaccaagtccatttaatagcctaaaaaaagaaaagaatgccaaccctaaggcattcccttctgtttgaaaaaacgcagagaggcttccttagtaaaggaatctccctagcagatccagggagcatcccaatttggtctctccaacagtgctaaccagtagccagcaccggccttgcacagatcctatgcagaagactaagctacatccaggaccccaaagaaaactcactctttttccggtcacctccaacaggggttttggaggctgggatgtatttcaatgaaaccaccaactcgcctttgtgtgatggcaagccagtcggggactcagcactgatctgaaacacagggaaacccaacaggtcaagctgggcttctcaagaattgttgggacttctctctgaaaaaaattctaaaattaccccccaagaacagcatcagggcaaaagaggatccttcttcatatgaatataatccaccgtccctaggccatggcagccacaggtttctatggcagtttctttagaaggaaatagggcagaaccaacaaagagtcttctgcaatacccactattatgccactttgggggcatagttactagattccaaatactctcaaagatcttcaagcaaggttgccatacaaactcacgaaggactgacagcatgacagagaatcttgctaccagcattgttagtaatagccaaaaagtggaaacgacctaaatgtcaatcactatagaaagagttaaatgaataattgtagtgtcctggtatggcatatggcatgcagtcatcaaaaaagaattcagtgaatctgtacatgctgacatggaaagatatccaagacatagggttaagtcaacaaagcaagatgcagaaaaatgttccacttatattaaaatatattcatagttgtacatgtgaatataaatgtatgtaaataacgattgccattatcacttatgttagcccttactatgtactaggcactgttataagtactttaggtgtatcattttgtttgatgactgtctctatgagacaggtactattaactccattttacaactgatggaagagaggaacagagaagctaagtaacttgcccaaggtcacacagttagtaattggcagagctaggattcaaattcagacagactggttccagagtccgtgcttttaaacattatactacactgcatagaaaaacccaggatacgaacaaacttatcctcgtttcctctagggagggcaacagaatagggaaatgaaagacaactttcccttttttactccatattaacttttagtgtccttttaatgagaatagtatatatcatttgtatggtttttaaaaatacaaagtatttttacaaggtatttttaaaaagaaggcttgcaggggaaaaaaaaaaagagggctttcagtcaggtgcagtggctcacatttgtaatcccagcattttgggaggctgaggtgggcaaatgcttgagtccaggagttcgagaccagtctggacaacacagcaaaaccttgtctcaacaaaaaacacagaaatcagccgacggggtggtgtgggcctataatcccagctacttgggaggctgaggcatgagaatcacttgaacccaggaggcggaggttgcagtgagccaagatcgcaccaccgcactccagcctgggcgacagagccagaccctgtccctccccccaaaaaaagaaaaaaggagggcttgcaaagatttgagggctaggtgaaactctgttacacgaatttggatttgccacaattataaattttgcatttaagttatctttgatcaatgtctgtctctaacactgcagccgaagtgccaagagacagaaatcaagcctatttttgttcatcctagtatgcccaacacttagcaaagtatctggcacatagtaggtgctccacaaatatttactgaatgaaggtaagagtgaacgaatgaatgtctgagatgagcagcaggtggcctattgtctttggctttgattggcagaactgcttcactcgattggctctctcggcatgactttgttccttgtgctttagtatccagagcatgagctggtgcagactagaggtgccctttcacctgcctgtattttttttttttttttttttttttttgagacagggtttcattcccagagcccaggcaggctagaatgcaatggcgcaatctcggctcacagcaacctctgcctcccaagctcaagtgattctccagcgtcagcctcccgagtagctgggactacaggcgcacaccaccacacccagctaatttttgtagaggtggggttttgccatgttgcccaggctggtccagaactcctgagctgaagcgatccacccacctcagcctcccaaagtgctgggattacaagcaggagccactgcacttggccttgcctgtgttaattggggttcctctaacttaggtccttaccaatgctaggaaggcataatccccataagtttggatcaacataccacatacccagaacacacagtttaatatatgtgagagagacaaaagaatcgggaggtagatgcaggcaagggaaaactgaataggagcaaatggattgctagggaaaaaacaaaaaacaaaaacaaaaccagaaacaacaaatgtagaagttaaaatcgatatataatatgggaatggtctttctgttgtttataaaatgtctacacaatttattaatttctagaaaattattttttagaaaagttctgtgaacttcagtggactcttaaaaattggagtttagcattagctagaaactggcatatttgttttagtagcacattcttattctggctccaaatatttacaaagagcaaagacctccatgttaatgtggtttcttctctttatataaaagttttattggcagtagttcatgatggtttacagtgacatttccaatataattatattgaccgtagagaatgacttgggtgccaaatggttaaaaaattctaaatttgtaataatatgttatactttggtaataatttctttcctgtctttttattgacatataatatttgtatatatttatggggtacatgtgatattttgttacatccatcattttgaacatttatcatttttttgcactggaaacatttcaaatcttctagctattttgaaatacaaatatttttgttgactatagtcatcctactgtgctgttgaacaaattcctgtttttattagtatttaaagggacaaatttaatgttgtcactatttttttttgcaagggcaacagctatcaaaatattggatttatatttcctttcactcagcaattccaccaacaggaacttctctgacagttacattcacaaaagaagaccaagatatattacagcatagttttaagagcaaaaaagaattcaaacaacttaaaggcctattagtgggggaatggtaaataaattataatacaggcacatgaaaaaatactatgcagcagcaattaaaatgagatagatctgtaagtgatggcacaaaaggatgcccatgataaatgaaaaaaaaaaatgtgtacaatgaggtccatgtgaacccatttgtgtaaaaaaagaaaaaaatacatataaatacatggatgcatatctgtgctgcttaatacaaaatttctttctttcttttttttttttttttttttgagacagagtttcactcttttgcccaggctggagtgcaaaggcgcaatctcggctcactgcaacctccgcctcatgggttcaagcgattctcctgcctcagcctcccaagtagctgggattacaggcttgcgccaccatgcccagctaatttttttgtatttagtagagacggggtttcaccatgttggtcagggtggtctcgaactcctgacctcaggtgatctgcctgcctccgcctcccaatgtgctgggattacaggcgtgagccaccatacctagccataaaaaatttctagaaggatacacaagtagtgttaacactggttatttctaaggaatggaacctactttccttttaatatactttatgttgttttaattttgaatcatgtgtacataagtccatttttgcttaattttcttaatatggtaaaaagttcaaatgcttaaaaaggggatatagagaaaactaaatattccttctacctcagtctccattcctagaggcagccaccatgactagtttctcatctaacttcccaaagtctatggaccatgtaaaaccatcccacatttaaaacgctagtgtaaaaaaaaataagatgaactttgtcatgtcattgtgtagttctgataatcaagaagttgctgaataagtcctctgttttagctatttcttcttagccagatgatttccctacattattttgtagttaagtgactcatctagttggcaagtgacagaaccaggattccaacacaggtctgcactcagatcccaggcatgattatgccatactgctacactgtggcccgaggtgccatctccaaagtaatatttccctggcctctgtaaccaagagcatagcaattggagctccatgaattgctttacttcccacttggaagtaaagcagtggcttggcaaaagggtacagattaggatatacacagaaggttagctcggagaagaggtgcgagttaggatgttaggatacacccagattctggaaggttaggagacaaagtttggtacacatatgaaaattttttcaaagcaaaaccatggcttcacactttgcctggtttacacagaactcacacttgatagacaaatgcctctgaaattgctgtcaaactcagaaacaccagcagggggcactagaactccagagaagactacattcaaagacgctaccaacatagaccagcagaggctactgcagacaattctacctcagatccaaactgcaggagttgttaaagcagactacctttccatgtaaagggaggcaatgatccagtttcttatcaagcttccaggaatccatctggatctctgcctctccaaggaaagtgtttctgccaaaacgaccatgatgccaaactgagaactgcagggtcctctgggccaggagagattctgggatctcatactgtgaagggaaagtaaaagcccaagatgattagttaagggtaattcttcagacaagattattccaaaacctgagcaaccattcctgaagtcactagtcctgaataccaaattactttatgttccctgagcactttgagtttcctcactcaaagcctcaacttaactcattttataaaaacctaccatattccataggaggacctggaaaattcattttttcttaagtggatgagataacactggattgtccaaaaagaactgccaaggagactccttatctcaaatgtcttttttacatgagatttgtggccatgtgaatctcaaacttcacatcaatccaggaaaggcagatcacctttgttctcttcactgggagatcaggatgtgaacagatacccaatgtatcctcagacacagacatggcccactgaagcccgtgtcacctggtcatgttgcagaggaatagctacagcttagggcacaagacagaacaagttctcctacccttgaggtctagatacttaccctcagcgtctcatcatatagtggattaatagtgtcccgcttgatgctggtttttctttttccttggcgggacttgtcaggcagaaggtaagtcttcacatatctagaaaccaaagacagcactgagtaatttgctggcctttctcaagcctgcttttcactttcctcctctccatatagatatgccatggtgacatgtgatgtcaaaaatgtcacctcaagccctcttagacatgccattcttgctttttcccaatcctggttcttttcctacattacacctccctgctcccccagaaacagataagctctgttcaagagtgcccggacagatgccggggtctggtctctggtctcagagcatcagtcaggttccagaagcactcacgggttagagcgcttcttggcttcatcagcataggccagctgatggcactccttc

SEQ ID NO: 596 - DNA, 994 bp, Homo sapiens
ggtcccttctccctcttccctccagggaaatatgggaactgtgagaggcagcaggcaagttatgggcagaggcagatacaatgagttcatgtgggaaatttctggtcagactagctctgtggttccaaaggcaaagactgcaccttgggcgagatgaatgcccttcgttgtctttatcactaacacttcaaatggggcaagccaggacatactagcaggtcaaaggcccaaacagcggaggcctactacctcctgaacagagctccacctggacctgactcaaggaacatttatatgcaactgaggagcttttgtttcatttcattttgaatagtcaagtcagtcttgctttctttaggtaaagttttacagtaacctcctttgtagtcctttgaagatgaggatttgagaaatcccaactcctaaagtaggggagagacagcagcagaatatgacccacagccagacccaaaggggctagcccgacccctgtatatattgtacctctctctctgcccacctctcccccacttctccccactgccccattctctcttatcctgcctattcctctcccctatttctctgtctctctctctctcacatacacacacactcactcacaagcagtacagtcactaagttggctaggtaatatccaaagcattctgattgtcctactttttgtaaattgaacttatttaagatattttagaagagatgagtcacgtcttcctttgacccttcacccataacacacataccattctcacaggaggccacatggtgcagtagagtcagactttgattcaaagcccaactctgtcacgtgacagtaggcttgagtttcctcatctgtaaaaagggaagatttcctacttcataaagtggttggagaaattaaagaaatagtatatgaagccttgcacataaaaagcatttgatatatattaatgcccttttgcacaagaggtcaagaattgcttgggttcta

SEQ ID NO: 597 - DNA, 25950 bp, Homo sapiens
cagttacaagaacatccccgcaggctttgtctccattcattactgggtgccagaaaagtttgggtgtgatgtccatttctgagttcagtttcaccacaggagagaaaatgcttcgtcctaaaaattcatctttgccctagagaaacaaagtgatccttaaattcccccacaatcatcccttcaaatctccatcatccccaaagttatcttagaaattctaaacgacctaccacttggtcattgtcaaaaagttccatgataactttgggtggattctgtagaactgtttggggttccccatagatttcaacttcatcgaatataattgtttggtcccacgtgggattcagggttgaatggatgatctcagtggttttgctccgatggaggaaacagatatgagcatatggatctaaaacagaaaaagagaataacaacggggccacggctaaaatctaactccccagaaccactcagtgcaaccatattcttttcctctggatataatgacagtgggctctgacaacctgcctggagatagggtttctagggagcagggagttccccatggaaggttctggcactgcagcagaggcacctgaagcgagaccctgatgtgtactgagaggtcactctttagagtatgtccccaccaaggttaatggggcccatagtttttctctgcaaaagtactgcactcatggttgagtgaggctctgcagtcagatacacctggggtcaacacccacacttcacccctgctgcataactttgagggaaaaaataatcttcctaaacgttgatcccctcctccatgcaatgaaagtaatatctgcttcacggtgttgagaggatgaaatgatataaggaatgttagctatttgggacagagcctgtcctataggaagtatctgataaatgctagtttttattatagttgtttctaatgttgatggtaatcgatttattcagcaaatatttattgagttccaggtctcaagagtataacagcagccggaaaagctcagatgctcatagagtttacaatctgtgacagcagaaaactttgtctcactatacttaagaatggagagaaagcaatattatgtatggagaaataatccatgttctcctccttgctaaataatttcatcaaactttttgcagttgcctgggggctgacttatctgaaaaataacacaatatctagcctgaaactcttgtataagccaaaagtgcttggtttctagcagtggagccatcatatgaaccctttgcttttgccctgatgataattcttctatctcaaactgcaaggaatgtgcttagagttttatgaagctttagtcaagaactttggaaagatgtttttttaactttcagtgatagagtgccccctggtggaaaatatttgaaaatgtcttcaaagaccctgttggagatgtatattgcagagataaccttgaatctgctcaaatttctaagaaaaggaaaccattcacaaatattggtaaatattagtgcttggaacacgcttcaaaattgatgtgagcacatgagagtgtcagtcaaatgctttaacaaactttccgtttggaataaaaaagtgcagctcgctgccagcactcatttctcggggcaaatgggaaatgggttaagaggtgttttcatagaaggcccagggaaactctgctgggctttgagtcccaaactggaattctccccagatagcctgaactatccatggttcagcggcaaggactcaaatccccagacaggcatgttctcccctcctcccctgtcccttgccaatagccttcctctcagaaccagtccgaagcaacaaaagcagctgggtgtcagtgcaagagaagaaaaagcctcatggttttatggtattgggaatgtggggagcaggcagaggaggaggttaaaatgaactccaaactgctcaaagcctggtgctgtaggcaaatgggcaaacttatcatctttttgataccttgaaagagcctgcaaaaaaacttaaaggatcttaacttaccaatcaacctgagggtccagggatgaaaacacagccatgtatataaacagagatgagaaatcactttctcggtgcttcttattacttaatcaattaatatctattagtaccaaaagtatcttctatgtattactaggacccagcaatggtgcctaaagcattcagtgatgatttatctaatgactgagcagtttgcttcaagcatgcaaaaataacctcaacatgtaaagggtttttgttgttagaaatgacaaagagcattcactcgaaacacagaagcaaaatagcatgctatgtaatcatgtgtagcatgtagattttttttcctttacctgaaaagctatccttatctaaagccaagaggtttctggcttgatagacatagcagcgcagatggtagatgtagactcctaaaaaaacaggataaagattacttacaagaagcgtaacactgtaaactgctattttactggaatatttggaaaaaatacatgtttctgataaatgggtcacttgaatctattatagttccccacagtaaagagcacatagaatagtgatgatgtggcctcccaaagtagttctatttcctgtaaaataaaacttattttttaggctgggtgcagtggctcatgcctgtaatcccagaactttgggagtcctaggcaggcagactgtttgaggccaggagttaggagaccagcctggtcaacatggtgaaaacttgtgtctctactaaaaattcaaaaattagctgggcatggtggtgcacgtctgtaatcctagctactcaggaggctgaggcacgagaatcacttgaaccctggagacagaggtttcagtgagctgaaatcacaccactgcactccagcctgggtgacagagtgagactcggtcttaaaaacaaaaatcctatttttaaaaaatactacagtaagctcaatgcaaagtgtatcaatcaggaaaacattacctttgttataaactaactgaatttagggtactgcttatcatcacagacctttaaaatgaaactgggtctccagcagctatagaaatggggctttctatactacttcagcatcagatctgggaaacagttaacatctaaaagattctttgacatttcaaaatattcatactccttttattattatattctctctgtctctatcactcacacattcactctctctctctctctctctctctctctctctctctctctctctctctctctctctctttgtgagatagcagagcattatgattccgtgcacagattctgggagctctactacctgagttcaaatctctctagtgcttacaagccataagactttgggcaagttatttaatcttcctgtaccttggttccttcttctgtataacgggaacaataatagcacctaccttacagggttgttaagaggattaaacaagttataatatgtacaggtcctagcccatgctaagacctatataagcatttgctaatattattgtagagcaggtctgtctcattccaaaaatcctgaaaattattattgaaatcaaccattatttaaattttggtgccttttttcctatagttaaaatttcaattttgggggcttactagacagaatgagcacatatgagatagactgttaatatcagtgatctgaccacccttcaccttatatgtgatatggttttcaactgtagttttaaaaactcctttcatcaaggatgaaaatgaaagtcatgtttgcatgaagagattttaaaaatcatattcagtgatttgaagagtttccttaagataagagttacagaagtggaattcacaaagtcatgtttaaaattcactgctggctgggtgtggtggctcacgcctataatcccagcactttggtaggccaaggcgggtggatcacctgaggtcaggaggtcgagaccagcctggctaacatggaggaaatgcaaaaatacaaaaaattagccaggcatggtgacgtgcgcctgtagtcccagctactcaggaggctgaggcaggagaattgcttgaacctgggaggttgcagcgagccaagatcgtaccactgcactccagcctgggtgatagggccagactcagtcttgaaaaaataaaataaaataaaataaaataaatcaaaaataaaacaaaactcactgtcaaaattgcaggaaacaatgggggtgtttgctccgaacacagtggtggcactgtgcttctgtttctccaggctcttctcatccccatcttcggtagtgtctgccccctgaagtcaattaacagagtcaattagcagagaagtcaataaacactgcctaaaagcaaatcaaccaaccaagaggcaagaataacaaatggaattctagctttttaaagatgttatcgtgcaaacaccccatttttaaagatgaataagtcccaggatagcaagtgacttccctgaagtcgcttagctggaaagcagccgagcaggaagtgggagccagccctcctacctccagtccaggtttgccaaaccctgctactgaaagaaagggaaaaaaaggaaaaatgtagaggataaacagggagtaaaaggatgggataaggaagagaaagagcagcagcagcagaatactgtggggtcagagtgcagaaatacaaacataggctgttgggaaatggctcctgaccaccctattgttttagatcacccactgccattctcctattccttccttccacctgcctgctttttcccccgacttctttactgtgcttcagtatgttcttccgtattgctctctaattttgtgagctagccttctgatttcctcccccgacatctgtatatttatgaatatacatatgaatattttgttgaacagttgcagtttccaagatgtgattcaaagaacttgtgcctgggatgtgaataggtgtcacctgaaacaagggtcctggaacagatatatttggaaaacactaggtaaagcaggtgtgtagacagcagtatttcttagaacactcctgtgttaatggtctattcgttctacacgaggtattgagcacccaggatgtgtggctttccctcaacctgttaatatttgccatcttatagtaccagggttacagggacctctatggagttggcagtgctgtatccaacactcatatattttctctacaccaatatgatctgcgctctggcaacctagtacttacaagggcaccttcaagtttaaagatggcagctgcaccatgtgtttctgaaggagccatttttctcctccagcgtctgcggcggaaggtatctgaactacgttgtttccagtgaaatttccagccaattagagaagcatattcccagccctcttggtcttgcaattcctccatggcctaaaacagaagtaaacatgttaatgatgacgatgatgatgatgatattccttattttgataaaacaggttatatgatcaatcaacagatacacagtattcaaaatctactctgtgccaagtactgagctagagtcaggaatacagaaaagaaaaaaacagacaggacctctgccttgcagagctgatggactgcaggagtgcagagagataaccaggcaatgacagcacagtcgtggacataccctcaggaggtgcacctcattcagatttgggggtgggtgaagcaagtggattctttctcaaattgctttctgtttcctcacttcattatttcataaaaatgttgctattgtgatatagtttgtaaaacattagtatctccattttacatatgtaggaaaaaaattaaatgccccctcccaggtttaaatgtcttgcctgagctaatagctgccataactgataattaagtgatcagaatatgttatttctgtaataactaataacaaattcgtgtggtactttttagcttaagaactattgatttaccagtggtatcagttttcaatgttatattctcttcattcgacaaatatgagtgcccactgtgtgacagggatcgtgttaggggctgaggacacagtgaagaagagatagggtctttgctttcatgcagctgacattttcatggcagaagtttgatttaaaatcttaaaaatatgactggatttaataaacgtaaaacaatgtggaataatattcaagacctgagaagtgagagctccatgtgggtaattattgttgggtctattttttcactttaaataaatgtaaaatgcaggttaagcataatcttgtacctgaccctctagtaacataaatagtagcagtgaaaaatttcacatagccaagagtaaggcaggttaggaaacatgatcaaaacctcagaaatactcgttagaactggaccatatcctgagccttctaactgatggctcagtgttcttcccgcttcaacttggtgccctcgtgtggaagaagagcgttcaagcaccttcagaaacttctcaccctgtcagacggggataattaaacaatagagagacattcattaaactaaagagcttctacacagcaaaagaaactatcatcagagtgaacagataacctacagaatggaagaaaatttttgcaatctatccatctgacaaaggtctaatatccagaatctacaagcaatttaagcaaatttacaaggaaaaaacaaccacattaaaaagtgggcaaaggacatgaacagataaatcttcaaaagaagacatttatgtggccaaaaaacatgaaaaaaagctcaacatcactgatcactagagaaatgcaaatcaaaaccacaatgagataccatctcacactagtcagaatagagattattaaaaggtcaagaaacaacagatgatggtgaggctgtggagaaataggaaagcttttacactgttggtgggagtgtaaattagttccaccattgtggaagacagtgtggcgattcttcaaagacctagaaccagaaatgccatttgacccagcaatcccattactgggtatatacccagaggaatataaaccattctattataaagatacatgcatgcgtattttcattgcagcactcttcacaatagcaaagacatggaatcagcccaaatgtccatcaatgatagactggatgaagaaaatgtggtatatctacaccatggaatactatgcagccataaaaaggaacgagatcatgtcctttgcagggacatggatggagctggaagccattatcctcagcaacctaacagaggaacagaaaaccaaacaccgcatgttctcacttacaggtgggagctgaacaatgagaacacttggacacagggaggggaacaacacacactggggccggcgggtggagggagcgcatcaggataaatagctaatgcatgctgggtttaatatgtaggcgacgggttgataggtgcagcaaaccaccatggcacacatttacctgtgtaacaaacctgcatgtactgcacatgtatctcggaacttaaattaaaaaaaaaaagactcattcattcattagctcatttatttgactagattatttactgggagcatatttctgagttagcaaggaggatacaaagatgactgtggctccatctttgcttccagaagctcaccatctaataaaaataatgtcatagtgcctaccggagttacccattctgtggaatagagagagttcctgtttggacttagcccgggttccagcaccagctttgtcacttactaaacacttggcccagagcaagtctatttaaactctgtgagcattatctataaaatgagcataaaatccaaaccttacagaacatagatgatgcatactcagtacctagcattatagaaagccacttctatacatgccacttattattgagtgttactgttctatttaatttattattattccatttaaagcttacaataccctaattaaaaggcatagatattattcccattttgcagatgagaaagaaagggaagtcagggtttgaatctttacacatcttgttccaagtcctgacctattaccactactagattatgctgccaaaatcatttccatttaacacctctgtagcagttctcaacatttagcctgcctgggaatcacctggatggtttgctgaactacagatggctgggcctgcccccaggatttctaaatcaggaggtttggggtgggacagttctaacaaattcccaggtgatgatgatattgctggctggggtgggctcactttgagaacccttgagtggagtgttaggctctggatttgcaaataatttctgcagaaatggctagttagctgggactttgtagtcaggagggcagagctccccagtccagctcccttcccttgcttctcttacccttgcggtgcttgaagcagtctgtgttaaatctttcttgcgttttcggaccagccttcgccgtctatgagtgtggtacattttctctgctgcaacccaggatttgggcttatgatcaggaggaatggtgattccatattcccagcctggaacagagtttgtgaatggttacccagaagagatgcatttgccagatcaccaaataaacctcgaggaaacatttgttcactctccctgccctcagatgttctgtactatcatgaccgaatatgtggctgttttcactttgctgggttattcagccaaactgaatacagcctcattcccatccagctcctcaaaatgcctccttggtggccatgttctcccctacttttatgcttccagtcattcatggtaactgagtgcacttaggaataaagcacagttcaagaggcaggaagaaacagcaggtaagcgtgtggactgtgcggttgcacagcctgggttcaaatcctagcatcgccacatgttggctgttaactaaataagtttccagcaagttggtaaacctgcctatggcccaatttccccactgtaaagtgggattatagggttacagtattttaacactatcaaaatgacatatgcaaagcattagggccatacttagcacacagctattgctcagtcaatgctaacgattattctgagatctggtgtgtgcatcgagatcagtgaggagcttataattgatttgaaatcttctgggtcaatgccagttctatgcaccatgcataaggaaagtaatgaatcagattttctcttttgagaattccaaatgctattgttcacttaactttaattatggttcagaaaaagacaaatatcagaagctatatcagtagtctgcatcattgctgcataggaagactttaagggtagtttacagttctcttttctgcgtcaggggggccctgaatgtgatgttcccagggaggttatggggtgtggttagaatagagaaaatcttgactccagctccctcccaaattctcatcctggatccccaagcatctcaaaacctgaccagttggccccatcacctgatgtttttcactcttaacaccccctgctcacttagcacttgtccatacacttgcctttcccttggattctacatttgattagtcacagacggtaccacatgacccagatgccacagaccagcggtccccaacctttctgtcaccaaggaccggttccatgggagacaatttttctatggacagggttgtggggtagagggaggatggctagattcccatgaggagcacacaacctagacccctctcacgtgcagttcacaatagggttcgcactcttaggagaatctaatgctgccacggatctgacaggaggcagagctcaggtggtaatgctcacttgcccgccgctcacctcctgctgtgcggccttgttcctaaaaggccatgaactggtaccagtctggcctgggggctggggactcctgccatagaccaacagaagtgaggcccctccctccaggaaactttatcctggttaaccaaggccctgctgcagagccccaatcaggtcacagatgtacaatgttacctttctcatccaccgctcgatttatgtcataagaccatgcatcatcttcccattcccaacctggaggacaagtcaactcgctgggtgatgctgctttatcgccgttcttacaaaacaaaaataaaaacaaagaagagaggtaagccatagtgtcagtaagaggcaaagggtccaatatagttcctcatttaactatggcattcacacctttacttagataccatcttagagatccatttcactcagaaaaatctctaatctttatttattcacaactgctaaataaaaattagtttaaactaccttttgtttttactattagggaatagtactaggttcaatcatgtgaaattgctgttgttataggtcaaagtggttgaatctcagcaatttcttatggttcaacttaatattatgaaatggtgcaactctctttatgaggggttacatgggatagaacccatcagagaatgggtaaaacattcaagacacatggttgtttgtttctttgttttgagacagagcctcgctctgttgcccaggctggagtgcagtggcgtaatctcggctcactgcaacctctgcctcctgggttcaagcaattctcctgccttaacctcttgagtagctgggatttacaggtgtgcgccaccatgcccagctaatttttgtatttttagtagagacagggtttcaccatgttagccaggctggtctcaaactcctgacctcatgatctgcccacctcggcctcccaaagtgctgggattacaggcgtgagcaaccacacctggcctgtttttgttttttttgagacagagttttgctctgtcgcccaggctggagtgcagtggtgcaatctcgagtcactgcaacctcccctcccaggttcaagcgattctcctgcctcagcctcccaagtagctgggattacaggcacctgccaccacacttggctaatttttgtatttttagtacagatggggtttcatcatgttggccaggctgatctcaaactcctgaccttcagcgatccacccacctcagcctcccgaagtgctgggattacaggtgtgacccaccacacccggcagacacatgtttttgagtatggggaaatgctactggaggttcataatgttaattatatacaattagcaaaatttatctaaaatattgaattaagtttgcataaaaatgaagagagttatgaaaagaaagttcctaagtaaaggaaataaaggcggcccataaacatgaaaaaatactcagctttactttaaattaagagagtgaaaattgaaataacaggataccacttattcatgtggcaaagattataaagcgggatgatgaatatttaggcaaatgggcttcttgtaattttgttgaaaatatgaatttataaaacctttttgaaggttataaaattttatcaaaattttatatgcatttaaacctagaccaaccaaatgcaaggatcttccctacagaaaaacgttcataaacatacaaaaatgtatgtttaaggatgttcactgttacattgcttataaaaaccaacgactcaaaaccaaaagcacctaaatgcccagaaagaggggattaaatgaattatagtaggtacatataataaaacattctgcaaccattttttaaaagctcatagatctatatgcattgacataaaaaatgtccaagatatattgttaagtgaaaaatacaagctatgaaactgtgtgtgcaacacaattctatttaggcagggaaaaaggaagttatatccttgtttatgaacagaaaacagacatcaatggttatctttggggagtggaatatggattggggagaataactacttttgatttcctttaatgctgcttggattttttaaagacagaaacatttcatttgttatactattaaaaactaggctgagcttggtgtctcatgcctataatcccagcactttgggaagctgaggctggaggattgcttgaagccaggagttcaagacccgcatgggcaacataataagaacccatctctacaaaaaaataaaaaattagtccagcatggtggcatgtgcctgtagtcccagctactggggaggctgaggcaggaggactgcttgagcccaggaatttgaggttagagtgagctatgatcgcaccactgcgttccagcctgggaaacagaaagagcctatctcaaaaaaccctcaaacaacaacagaaccctaattagataataataaaaatttacctaaaaaatttgcacaatccaaactataccatgttccaacatcgagttaaataggcctcatttctattctaaagaaaatacttattgtggcacttgtgtggcttaagctataagtggaagactcttcagaacataagatggagcggaggagaggttaaagcccaagccaggtggctgctgggttccccgcagatcacgatcagaggtgacaggtgagagtttctctccggagcaggccactcaccgcatccgtgtaggtgtcctcggccggcttccagtcgcccccggggtagcggctctcgttctgatagacttcatcagtgaactccgtgtgacctgcatctgcctcagtcagcaagctgtggggcggggagggctcaagttacccaaggagaccgggtaaccggcagcctcggcgattgccaacactcaggaagcatctacaccctgggagtggcaccacttccctcctcgctttacccctgttggttctgactccaaattcctctttgtactaatcgcttttgacattcctttgaagaaagagcctgctggaacaatgtgacctaaatcataaagaactcctcaaattaacaaggttgctccttctcagtaatgaggatggggtctgggaaaacagtattgtgggcagcttcttacagagaccacagacaacgccttccatgtttctgtttcagttccgggctgctcagctttatctcaatgaaactcttggctaacagttcaaaagaaaagggagctgtccccactattttttaaaacagagtgtagacggtctcatgaagccacatgtggcttgcttggtctacataacacaaactgaagggaggagtttaagttttctggagagttcctaggtagacagccaaaccaggtcatttcagactccaaactccatttgggcatttgggaaatccatactgactctctgccatgttaattttcctcttggatttggaattctttggacaacccgcagaggaaagttacagaggctccaactttgactcaagtcttctgccaggtacctactcaagtgagggttttttttccctttattgtttctgcatcttttctctgctgtattctcccctagaatccagcacaggaaaggaatcaaaaaaacaaacagtcccaatcacttatatgaattgggcatcacgtctctgggcctcaaaaaaggagaataaaagccctggctgctgcctgtaggattccatccagccctgacatgctttgaccttctgctttttctatcacaatttccctaccctttccctgtcctcactaaccttccttccttccagccaattcaaaccccattttcctttccctcaccaatttcccccaactccacccagagcaagctgcctgaattgaaagcaatcacatgcaagcaagcacgtttgggtcttaagagagcagtattttctcttccctcctccctccctaatgcctatgcaattacaggaaatgaacaacagagagaccaaactctagttggaggccttaaaattcaacttcacaaggtttttccctcccaactcaaggctgctgtcataagatggcaagaagagggaatgctggttctaatgttactggcaacatttagcaaacaggctacagtgtcccccagactccaggggaaccatctttaccaccttctactgtttatttttttctttctttttaataacagcttttgagatgtagttcacatatatgaaattcatccacttacagtatacctcctaccatttcttgcagacattctagcataatagttgagtactggtttgggtgcccacgctagacttggattctagcccctactataccattgacaagcaatgtgcctttggacaagttatttaatctttctagatctcagtttcctcatttgcaaagtggagataatactactacttgttgggagataattctctgcgagtctcttgtgtttctgcgcatcttgtgagctcaggcactgactacctttgttatgggctatcttctcaaagatgtttatatggggaacactaagatagtctctctctgcacagcaaagggccagcctgcttactgcccattataaaaaattcaagtcccctaagcttagagttctctcatataactcaatccactgtgtgtacaagtgtcatctggccctcttcatgttactctgtgggaattcgggcatgaaaaagtcgagcaaatatcaatactctggcattgctattgctgtgggcaataaagttcttttattctaacccaggagtcatgtgccggcatctgtgaaactgtgacgggggaccttgttcgcttgcaagtagggtcaaatctcagatccttcttgccactgcctcccttgtagggctgtagtaaagattaagtaagatgacgccagtgcccagcacactgcctgacacagtcaagcataataatttctcaaaatgttagttaccaggtgctttttatattagcctgtcttatggtggaacatctttcaactttctacaaatttcaatggacttagttctgctcagtgggtgttacataactattatcaagatgatgacggagatataatatatttagcaatttctagagaaagatttcattgctatcctttttactcagaaaatggacaacttaccttctttcaggatcaactatccactctccttcccattcccagccttttggaggcagaaaaaattccctcttgagttttatttttcctgtgacatcagaaaacttatgacgtcctactaatccagaagtaccccattttccaaacatgagagcttgattttcatactattaaaaaagagataaaattggagaaacaccatcagagagcaaaaaataaagctagcacatacattttcaagttcatcgaggacttaggctagacaactacagaaagcagaaaaaagctttatgctcagaaggtatggacctaacttgagctattactgattatgcaacttcggataaatcattcaactttctaggactcagtgttctcatctgaaatctgaggataatgctacctctcctatagagtcattctggagtttaaatgtgcaaatgattgcgaacgtgctttgtaaatagcgatatagcatcctagttgcttctattataattttgaatggctcaagatagttcgcgaaccttatcttttaaatcctatgaaagtcctcagcttatgaatgagcagattttataaaatttatttgtaagtctactgctgagaacttggggcacatttccctgtagaaacaatatacaattaatgttgccatttcccaggcagtccaccaaaaaacccatctgaaacatgaaggtcctttaatacccagcccttattagacctaaaagttatgagccttaattccatctggaatgtggcaaggagaccaaggcctctctgggaagcaggctgaatggcaatggcagactctggcttttagggcattcctttccaagttagaatctataaatctatgacggtctgctcttcatcatggcaaccatggaaagggtagagatttgccagtgtggtgggtgtccatgtttggatccaaactagaatttccaattgtctgctgatgaatccactgagaagatgatttgcataagccataggaaagcttttggctgaaggagaaaggaggagatttgagtgggggcctgattaggaaattggaatcaagaggacacaatggtgcttatctcagatactggctgtcagcctggaggggagatgagcttcaggcagaaactaaaggaactgttatcctaagggaccttaaggcttggggtcacatgacatggacacagaatggagagcaagacattcctcctgttctgcttggaagccagcatagccttagtaaaatccaggcaaagacttggcatggacaagagggtatcagcagcagtggagatgggagcctcaagtggctttgagggctgtggctttagtcagcaggactggggcaggacagtaagaaaaaagtattcatgagcaagcacatgtgaagcacctcatagactcccagaaatctcgggggtgggggggaattttgtagaaaattacgtgctagtattattagcacatgaaggcaagagccagtaaaatttccattattattaatgtgcctctgctggtactcaacaggtgagtcacacagaacaacagaaatgagtggatcatctctctacataagttgaagctcaggcttcactctatgcagggaaggatccaaaaatgggaaagagtggaaggaagccctgggctggtcgatcattgctcagggctgctttctccagtttagacccagccacagagctggagggcaggtagatgccaagaaatcctacaggaaggcaggaatgagcctctccttacctatgccatgaagcccctactccacacaatccagctggctggacatcaacatcctccattcagggcctccctagtggcctccagcacaccctctatcttcactagcacctctaagcctgagctgcaagggcttgtatgtttcccacacattctactgtttcttaaagtggtccccactctcgccccatgttggaatcaccactgctgctaatccctaacccaagctacacaatcagaatccccagggtgcccctgggagtctgcatgcttaacaagagacctagttttgcaatcattgcaatagattgtgagatccttgaggaccaggcttggcttcttcatcatcttcagcagctggttacctggctcagtgcctagcatgaagccaccactccctaaaagctccgatggacagatggagggatggaggaatgaatggttgggtggacagtaggacagataaattgtcatcatttatttattcattcaataaacaggtattgggacctgttatgtgccaggaactgctgaatgaataaaaagtaaaaataaaagatggtcaagggttgtcttgcctagcaagcagatcagagccacaatcctgaaccagttgtcaggtatagcagtgagtagcaggaatagatttctagactagctaaaatgatgacagtcttcacctcatttcttggagcatgaaggcctatctgtagagtggtgttcatctgaaagttatcagaagagacccaccaaatacatctggtaaatttaagtcaataagcacttgagttaaaaatagcataaaaaatcaaaacaattctacttttagctgtaaacatttgtgaacattattttcattggtttaattgtaatgagacttttcattaactacatggattttaagctcagtgaaggttttacaaattatctctattgttttagaagtattcagacagcttttttttttttttttttttgcccctggacaagcctatctgaggcttcccttaagtgtgaaatgggtcttcaggggttttaagacactctaccccaagtaagcttatcaagatctgaacatctcaagtgtcccctctcctgggttggtgtgtgtgtgtgtgtgtgtatactctacttagtgtcccagcatcaggaaccaataagattattacagagttctagttttgagagctagaaagacacccattttcagtattgctagtaagattgtggtagaagtggaaggcatctaagtcatctcttggaattatcacacaaaagtgttaatcaccatggtgtgttccaatgttgactataaaatctcaggagcatcttctcttatcccttaggttaagatcccttcgatgggattttaggggatggtaaggagggctgtggttgtttttggtatgtaaatgttttccataaaggtgaaaagtaaaagtgcccctcccccgaccaaagaagaaaagatagtgaaatcattaaaggtaccatttcagcaaagacggtgaaagttccttctgcgaagctgttaaacttcttctccacagcacttaagcctagccagatgttcactcgcaactccacaggcacctttggcccgttgtttttctcctgtggatactgtgagatgaacaatagcatgtgatgttacattaggcacagcaaagactgtgacattaagttaaagccaaaaacagagggaacatctaatcattgctttcaccagtctaattttatgtttgcttcagttaaaacatttccagatgaccctacagcaaagattaaaatcacaattaaagcagcagatctcacagtgtgatccatagattcctgcctgtccctgagaccttttcaggaggtccacaaggtcaaaacaatttttctaataacactaacatggtatttatcttctttactgtattgacacttgcactggtggtgcaaaagcaacagtggaaaaaactcctgcactgtagcaggaatcaaggccggattgccaaactggacctagtagtaacagtaaaagtaatagtaataataacagcaatctcagtaaagaaacaaaattccagtttcactaaagaattatctttccctttttatgtgcaaaaacataaaaataaaaggattctgttgatcaagcagtaatgattactaatttttttttttttttttttttgagacagagtctcactctgttgctggagtgcagtggctcaatctcggctcactgcacccttgacctccagggctcaagcgatcctccctccccagctgccagagtagctgggatcacagatgcatgccaccatgcctggctaatttttgtattttttttgtagagacgggggtcttgccatgttgccctggtgggtcttaaactcctgaactcaaacgacccacccacctcagcctcccagagtgctgggatgacaggcgtacaccactgtgcccagccaagattaccaatcttattaaatctcgacccttgaatacatgtcttgttaatattttgtgtgatgagatgggaagtacatgcgaagcacttctgctgcatattggcatatgatggttgtcttgagaaaaagctcttgtgcaattttttgagttgtaagttgaactagatttttgaaaaatgaaatatcacttttacttaaaactgcgattgacaggtaaacatggttattccaatttgagtatggggcaaggattttttttttaaacataaacaaagtgaacctctcactccaaggaaaataactctttatttgttggtgatgacaaaattccagctttcacgtaaaataatagagtgttggaaaacatgaatctgtaacaataagtttgatagcttcccaacacatagactttctgataagtgatattaacaaatgtgatttcaaagtgtgtttttttcaatattgtatgatgaaatgtgtcataactcagtgatctacataactcagtgaattttccaaatgattgtacattatgttacaaaatcatgcatgaataaaagagtcattcaaagtccaagaaagaccaaggattttaacgtagctgagtatgaaaaattcattgatatggtttcagatgtcacactgcaattaaccttttaaaagctaccacttgagtttagtgttatatcaaagatgaatattcataattatctgaaaaggttattataatactcctcccttttccaactacatatctatgtgacgccagatccttatcatatacttcaaccaaataactaattccatcagcttaaatgcacaagaagatgagagaatccagttatgtttctgttcagcaagacattaaagaagtttgcaaaaatgcaaaacagtctcactctgctttctgattttttacacaaaatgtattttgtaaaaatatgtagtttattaacattttaaattaaatatgtaattgatgtaatttatgttagtaacgggttattgttacagttaaatcaataaatattttaaaaatttatcagcttcgatctctattatagtaaatattcataggtataacccacataaaccaaagctctctggggccttcaacctttttttttaaagtataaagggatctcaagaccaaaaaaactcatgagttaaacagctccctaaactgtgtaatgagtattaacaaaatcaataaatatacaaaacattctcttaaaagcattttgctgtttatccactaacttctaaaacctaacacagagaaggtgcctttgtctcctctcccaccccctgtgaagctttatttattaatcagtttgcttccacccactgctgaggtcaattataattgtggttctatcttaagtaaaatttattctaccaagagacacttgaaagaagataatcactctgattctatttacaccctcctgattaaagagcaatgagtaaatttattaaaagttagcagaatctccttgtttgaagagaacactctctccaactctgctttttctcttcttaattgttatttctctgtcccaaatgcaaagaactccagttggggttggccagagagatgacgtcaaaacatatagatgggaactattctgatttctttgtttcggccctaggctcacctttgattccccatatacacacacagagttctcaatacggggccctggaacaggcttatgggttgtatgaagctcctaaattctatgcaaaatattagctgaacatgcagtgtgcatttccctggaggagaaggcctgtggctctcgtcaggcacttaagagagtctatgactctaaaagtattcagaatctcttccctaaagttacgattgtcaaaaatgttcaatttgattggttcatcaaattgaaattgattcaatctattgctcattaggttagagcaacagattccatgaaccatccctactgctttctctttctttccccaacattcactagaatgaaaggaagaaaggcattgccttgtgtgaaatattagaagtgaaatattcatgccagaaagcaaagcattcacaatgccatgtttatattaatgtcacaaagacatctaaggaggtgtcttgattgaaagctggccaaccttagatgcactctctctcagaattattgccccagagagagggaccaggatgggctagaattgatcccaatcacccttaccattcaatgatttgcaaatgatataaagcagacccttctcaggaatacagcttttgcatttagtgtgtttcacatgacacagtgaagatatgtaccttcagaaagatggtttgggttttcccacagtattttccagatgcattctcaccactggtggagtacaagacctgatgtgcgggaattcgtgcataggccagtctcttctctccccggatcatccagatgatgatgtcaggcatgctgttctgtggctggtcatgaggattggatggaagaggaagcacagccatggttagtctaaatggagagggactgaagaccctgcaggctggaccctcagggattcatttagcaaagaaacgctgtggttagggctctgtctcaaattcctgagctcccatcttctaggaccgcactgtgagtttgcagggctgggaggcagactgtggctggccaaagggaagggcgagaagcagaggcgcagcttcacctagcaaaagtccctcctactcttctctgggaggtatcttagaaaatattccatcttatctcaagcatcatttgaagaaagccaccagcagcagtcaaaaggttacagattgcatatattttacaggataaagagtctctggctcaccatccaatatttgtcaaatctgaaatattaattttgttttcaaaaacctctttttttattataaagaagataatccagcttccagagctggatatgcaaatgtccctattggcacacagtggtataaaaaaactgcctaagtccactatagaacactgtgaaagtaccaaagcatacaaagtagaaaatgaaattacctataatcctgtgtgctttttcaagcgtatttctacccacaaatatatgactacctacccaaccctctgatttctgagagacaggaggagtcgtctccttacttcctcattcttctagtccaccgaagttagtggaggccagcatttatccagcacttactgtatgccctcaactgtgctaagccctttacacctaccatttttttttatactttaagttctagggtacatgtgcacaatgtgcaggtttgttacataggtatacatgtgccatgttggtttgctgcacccatcaactcatcatttacgttaggtatttctcttaatgctatccctcccccagccccctatcccgctgacaggccccggtgtgtgatgttccccaccctgtgtccaaatgttctcattgttcagttcccacctatgagtgagaacatgcggtgtttggttttctgtccttgtgatagtttgctgagaatgatggtttccaccttcatccatgtccctgcaaaggacatgtactcatccttttttatggctgcatagtagtccatggtgtatatgtgccacattttcttaatccagtctatcattcatggacatttgtacacccaccatctttttaaaatcttcacacaacaaagctaactagtaagtgctatgtttatctccattttacagatggggaaactgaggctcagagaggttgaataacttgcccaatgttatacatggtagaaccaaggttcaaattcaggtcttcccaaccccagccaaagctgacattttaatcctgtgaactgcaaagaccattcaaaatattctccgacagtaccatgaaaatgataatgatttgtccacttttgaagacatttccaagatcaccaactcaaaattcttcccctgctctgatttcaatcacattcatcattagcatcctcagcccagttactccctgatttttacaatctgtcagagctgctcaatatccaagataatgtagtagattctctttccaccatcctattcttggtgccatttcgcagagcccttcttccatatcaggtgacgtttgtgtagtttaaaagtcctacctcttcagtcagctgcattaatttatcaagccagtcctcaatttctgccagtgtggacttcacatctgtggcttccgacctcatcctcacagccgcctcatgtatttgggagagagacctggaccgcagctttcggatctgagtatcgagaactgtgacgttggcttttccttctgtgagaggcaacgtgtatctagaaaaatgaagaaaaaaagaaacagaggatttgaagaataacctaattttaggcttcagaactgtcaaatacatttatgttggatttccatcttgcaaaccacatcaacctcctaactgaatctacaagcactgcctggtttacgctggagtagagtgtatctggcattgccagagcagacctgccggtctcttgatgttcataaggaatacagggagattaaaatcccaaagccattttaggccttagggtttaacctacggcccaaggagtcactggaaagaagatggaaacagtggcagctgagagaaactggctttcccttcttttgcttcctagaatcattttacagaaccacaaaatgatggaagaagaagggaggctagagaccatttagctgaagcatacttaacttagggaatcctgggcctttaagcaatctatgggtgggtctcgaaggtctgtgaaactctggaacttataaagaaaactgtgtctatctgtgtcaacacgtagtgtgatgtaatgatgaacataggctttggagccaacaacctgggtactaatcgtggctccattctttactagttctattgtcttgaccagtcacttacttccttgtcctcctattttcaaatgtgggacatgctttttagggctgttgtgagaaggaaatgagttgctgtatggaaaggatttagaatagttgcatagcaacgtctaaacaatgttgccatcctcatcatcatcttgttgtcatctttattatcaccatcatctcatcagattctcaaaggggcccatgaactccagaaagatttatgaaccaaccatgtaggccaaatctccattcaatatgagaacttggatgtgttgtgatgagacccccaagggttcctgagaatggctgagctagagccagaattagccttctgctgccaggccttgcctcccaccatggcatctggtgggacacagggtgaggatttccaccaggttcacgaagctctgattcacagtgtccttacctagaatttccactcacttgaatttcacctagcttcttcaatgaagaaaatcctagcacaacttcccttagacactgaatttcctgttacataaagtttagaaagattccaatttgattcctcaaaaacagctcatatcagaagtataaatagatgactgtggtttgctctgcaaatcttaaaattcacagacattttctccatgaaagttattaccaaatgtttctgtttggtttcataaataactacggcattgtatttgaagggttaattccccagagtgagactctgaggcaaaaagatatctggaagctgttagttcaaaagtcacacttggggccttgaacaaatagatgtctactgtgaaatacatggcaggaagaggggctgagttggcaaacccagctctgggcatcagatatgtcatttctcctctttgggcctctgttttctcatttacaagataaggagactgaaggacatgatcccttaggacccagctctaacattcagaacttaaacaagcaccccagcagtactttgattttggttgcgtttcaattacctggctttaccactaggaggcacaagaagacagggtgacttagggtgttagcccagtgtggggaataaaggcctttttgcttgtggaaagcattcaatatgcttttctttcggaacttccctgtccactgctttattaaccaatatttaaaatgagtttggaacgaatcacttccccctttgatttccatatgctaaaagatctgagctgtttccccgaatcagttatgaaaggtccgctggttcaagtcaaatctactggttttgcctaacagaggcttggccacagtgttcatcaggcattcagtaaaagagcaagtaaaagggcggtttctaaaaatatgtttatgaattagagatattgttctgaatggtaaaatcaatgctccactcccagatcccattctccgtaggagccagaagtcacccttctccagggtgggggtcattcttgggttgatgagaagcagaggctcaggcttgcttctttctccgctccccatcccttgcctgaggctgcctgggacgtgcttctgggagtggggcctcagcctccctaggctacttgagaactggcaccaaatcagaaagtggagcttttcctggtggtgattcaggcactcctcccagtgaggacttttttcgaagtttgaataattcaaaatcacttcttagacaaacactagaaacaattccacaggatttacagtcttagaatttcagggaggagcgcctggatgaaaattctgagataggcgtaagatcactgtacctcgtgtcttctataacttcatctatcagcttcagc

SEQ ID NO: 598 - DNA, 20210 bp, Homo sapiens
aggcagatgcaggtcacacggagttcactgatgaagtctatcagaacgagagccgctaccccgggggcgactggaagccggccgaggacacctacacggatgcggtgagtggcctgctccggagagaaactctcacctgtcacctctgatcgtgatctgcggggaacccagcagccacctggcttgggctttaacctctcctccgctccatcttatgttctgaagagtcttccacttatagcttaagccacacaagtgccacaataagtattttctttagaatagaaatgaggcctatttaactcgatgttggaacatggtatagtttggattgtgcaaattttttaggtaaatttttattattatctaattagggttctgttgttgtttgagggttttttgagataggctctttctgtttcccaggctggaacgcagtggtgcgatcatagctcactctaacctcaaattcctgggctcaagcagtcctcctgcctcagcctccccagtagctgggactacaggcacatgccaccatgctggactaattttttatttttttgtagagatgggttcttattatgttgcccatgcgggtcttgaactcctggcttcaagcaatcctccagcctcagcttcccaaagtgctgggattataggcatgagacaccaagctcagcctagtttttaatagtataacaaatgaaatgtttctgtctttaaaaaatccaagcagcattaaaggaaatcaaaagtaattattctccccaatccatattccactccccaaagataaccattgatgtctgttttctgttcataaacaaggatataacttcctttttccctgcctaaatagaattgtgttgcacacacagtttcatagcttgtatttttcacttaacaatatatcttggacattttttatgtcaatgcatatagatctatgagcttttaaaaaatggttgcagaatgttttattatatgtacctactataattcatttaatcccctctttctgggcatttaggtgcttttggttttgagtcgttggtttttataagcaatgtaacagtgaacatccttaaacatacatttttgtatgtttatgaacgtttatctgtagggaagatccttgcatttggttggtctaggtttaaatgcatataaaattttgataaaattttataaccttcaaaaaggttttataaattcatattttcaacaaaattacaagaagcccatttgcctaaatattcatcatcccgctttataatctttgccacatgaataagtggtatcctgttatttcaattttcactctcttaatttaaagtaaagctgagtattttttcatgtttatgggccgcctttatttcctttacttaggaactttcttttcataactctcttcatttttatgcaaacttaagtcaatattttagataaattttgctaattgtatataattaacattatgaacctccagtagcatttccccatactcaaaaacatgtgtctgccgggtgtggtgggtcacacctgtaatcccagcacttcgggaggctgaggtgggtggatcgctgaaggtcaggagtttgagatcagcctggccaacatgatgaaaccccatctgtactaaaaatacaaaaattagccaagtgtggtggcaggtgcctgtaatcccagctacttgggaggctgaggcaggagaatcgcttgaacctgggaggggaggttgcagtgactcgagattgcaccactgcactccagcctgggcgacagagcaaaactctgtctcaaaaaaaacaaaaacaggccaggtgtggttgctcacgcctgtaatcccagcactttgggaggccgaggtgggcagatcatgaggtcaggagtttgagaccagcctggctaacatggtgaaaccctgtctctactaaaaatacaaaaattagctgggcatggtggcgcacacctgtaaatcccagctactcaagaggttaaggcaggagaattgcttgaacccaggaggcagaggttgcagtgagccgagattacgccactgcactccagcctgggcaacagagcgaggctctgtctcaaaacaaagaaacaaacaaccatgtgtcttgaatgttttacccattctctgatgggttctatcccatgtaacccctcataaagagagttgcaccatttcataatattaagttgaaccataagaaattgctgagattcaaccactttgacctataacaacagcaatttcacatgattgaacctagtactattccctaatagtaaaaacaaaaggtagtttaaactaatttttatttagcagttgtgaataaataaagattagagatttttctgagtgaaatggatctctaagatggtatctaagtaaaggtgtgaatgccatagttaaatgaggaactatattggaccctttgcctcttactgacactatggcttacctctcttctttgtttttatttttgttttgtaagaacggcgataaagcagcatcacccagcgagttgacttgtcctccaggttgggaatgggaagatgatgcatggtcttatgacataaatcgagcggtggatgagaaaggtaacattgtacatctgtgacctgattggggctctgcagcagggccttggttaaccaggataaagtttccttgggagggaggggcctcacttctgttggtctatggcaggagtccccagcccccaggccagactggtaccagttcatggccttttaggaacaaggccgcacagcaggaggtgagcggcgggcaagtgagcattaccacctgagctctgcctcctgtcagatccgtggcagcattagattctcctaagagtgcgaaccctattgtgaactgcacgtgagaggggtctaggttgtgtgctcctcatgggaatctagccatcctccctctaccccacaaccctgtccatagaaaaattgtctcccatggaaccggtccttggtgacagaaaggttggggaccgctggtctgtggcatctgggtcatgtggtaccgtctgtgactaaccaaatgtagaatccaagggaaaggcaagtgtatggacaagtgctaagtgagcagggggtgttaagagtgaaaaacatcaggtgatggggccaactggtcaggttttgagatgcttggggatccaggatgagaatttgggagggagctggagtcaagattttctctattctaaccacaccccataacctccctgggaacatcacattcagggcccccctgacgcagaaaagagaactgtaaactacccttaaagtcttcctatgcagcaatgatgcagactactgatatagcttctgatatttgtctttttctgaaccataattaaagttaagtgaacaatagcatttggaattctcaaaagagaaaatctgattcattactttccttatgcatggtgcatagaactggcattgacccagaagatttcaaatcaattataagctcctcactgatctcgatgcacacaccagatctcagaataatcgttagcattgactgagcaatagctgtgtgctaagtatggccctaatgctttgcatatgtcattttgatagtgttaaaatactgtaaccctataatcccactttacagtggggaaattgggccataggcaggtttaccaacttgctggaaacttatttagttaacagccaacatgtggcgatgctaggatttgaacccaggctgtgcaaccgcacagtccacacgcttacctgctgtttcttcctgcctcttgaactgtgctttattcctaagtgcactcagttaccatgaatgactggaagcataaaagtaggggagaacatggccaccaaggaggcattttgaggagctgaatgggaatgaggctgtattcagtttggctgaataacccagcaaagtgaaaacagccacatattcggtcatgatagtacagaacatctgagggcagggagagtgaacaaatgtttcctcgaggtttatttggtgatctggcaaatgcatctcttctgggtaaccattcacaaactctgttccaggctgggaatatggaatcaccattcctcctgatcataagcccaaatcctgggttgcagcagagaaaatgtaccacactcatagacggcgaaggctggtccgaaaacgcaagaaagatttaacacagactgcttcaagcaccgcaagggtaagagaagcaagggaagggagctggactggggagctctgccctcctgactacaaagtcccagctaactagccatttctgcagaaattatttgcaaatccagagcctaacactccactcaagggttctcaaagtgagcccaccccagccagcaatatcatcatcacctgggaatttgttagaactgtcccaccccaaacctcctgatttagaaatcctgggggcaggcccagccatctgtagttcagcaaaccatccaggtgattcccaggcaggctaaatgttgagaactgctacagaggtgttaaatggaaatgattttggcagcataatctagtagtagtaataggtcaggacttggaacaagatgtgtaaagattcaaaccctgacttccctttctttctcatctgcaaaatgggaataatatctatgccttttaattagggtattgtaagctttaaatggaataataataaattaaatagaacagtaacactcaataataagtggcatgtatagaagtggctttctataatgctaggtactgagtatgcatcatctatgttctgtaaggtttggattttatgctcattttatagataatgctcacagagtttaaatagacttgctctgggccaagtgtttagtaagtgacaaagctggtgctggaacccgggctaagtccaaacaggaactctctctattccacagaatgggtaactccggtaggcactatgacattatttttattagatggtgagcttctggaagcaaagatggagccacagtcatctttgtatcctccttgctaactcagaaatatgctcccagtaaataatctagtcaaataaatgagctaatgaatgaatgagtctttttttttttaatttaagttccgagatacatgtgcagtacatgcaggtttgttacacaggtaaatgtgtgccatggtggtttgctgcacctatcaacccgtcgcctacatattaaacccagcatgcattagctatttatcctgatgcgctccctccacccgccggccccagtgtgtgttgttcccctccctgtgtccaagtgttctcattgttcagctcccacctgtaagtgagaacatgcggtgtttggttttctgttcctctgttaggttgctgaggataatggcttccagctccatccatgtccctgcaaaggacatgatctcgttcctttttatggctgcatagtattccatggtgtagatataccacattttcttcatccagtctatcattgatggacatttgggctgattccatgtctttgctattgtgaagagtgctgcaatgaaaatatgcatgcatgtatctttataatagaatggtttatattcctctgggtatatacccagtaatgggattgctgggtcaaatggcatttctggttctaggtctttgaagaatcgccacactgtcttccacaatggtggaactaatttacactcccaccaacagtgtaaaagctttcctatttctccacagcctcaccatcatctgttgtttcttgaccttttaataatctctattctgactagtgtgagatggtatctcattgtggttttgatttgcatttctctagtgatccgtgatgttgagctttttttcatgttttttagggccacataaatgtcttcttttgaagatttatctgttcatgtcctttgcccactttttaatgaggttgttttttccttgtaaatttgcttaaatcgcttgtagattctggatattagacctttgtcagatggatagatagcaaaaattttcttccattctgtaggttatctgttcactctgatgatagtttcttttgctgtgtagaagctctttagtttaatgaatgtctctctattgtttaattatccccgtctgacagggtgagaagtttctgaaggtgcttgaacgctcttcttccacacgagggcaccaagttgaagcgggaagaacactgagccatcagttagaaggctcaggatatggtccagttctaacgagtatttctgaggctttgatcatgtttcctaacctgccttactcttggctatgtgaaatttttcactgctactatttatgttactagagggtcaggtacaagattatgcttaacctgcattttacatttatttaaagtgaaaaaatagacccaacaataattacccacatggagctctcacttctcaggtcttgaatattattccacattgttttacgtttattaaatccagtcatatttttaagattttaaatcaaacttctgccatgaaaatgtcagctgcatgaaagcaaagaccctatctcttcttcactgtgtcctcagcccctaacacgatccctgtcacacagtgggcactcatatttgtcgaatgaagagaatataacattgaaaactgataccactggtaaatcaatagttcttaagctaaaaagtaccacacgaatttgttattagttattacagaaataacatattctgatcacttaattatcagttatggcagctattagctcaggcaagacatttaaacctgggagggggcatttaatttttttcctacatatgtaaaatggagatactaatgttttacaaactatatcacaatagcaacatttttatgaaataatgaagtgaggaaacagaaagcaatttgagaaagaatccacttgcttcacccacccccaaatctgaatgaggtgcacctcctgagggtatgtccacgactgtgctgtcattgcctggttatctctctgcactcctgcagtccatcagctctgcaaggcagaggtcctgtctgtttttttcttttctgtattcctgactctagctcagtacttggcacagagtagattttgaatactgtgtatctgttgattgatcatataacctgttttatcaaaataaggaatatcatcatcatcatcgtcatcattaacatgtttacttctgttttaggccatggaggaattgcaagaccaagagggctgggaatatgcttctctaattggctggaaatttcactggaaacaacgtagttcagataccttccgccgcagacgctggaggagaaaaatggctccttcagaaacacatggtgcagctgccatctttaaacttgaaggtgcccttgtaagtactaggttgccagagcgcagatcatattggtgtagagaaaatatatgagtgttggatacagcactgccaactccatagaggtccctgtaaccctggtactataagatggcaaatattaacaggttgagggaaagccacacatcctgggtgctcaatacctcgtgtagaacgaatagaccattaacacaggagtgttctaagaaatactgctgtctacacacctgctttacctagtgttttccaaatatatctgttccaggacccttgtttcaggtgacacctattcacatcccaggcacaagttctttgaatcacatcttggaaactgcaactgttcaacaaaatattcatatgtatattcataaatatacagatgtcgggggaggaaatcagaagtctagctcacaaaattagagagcaatacggaagaacatactgaagcacagtaaagaagtcgggggaaaaagcaggcaggtggaaggaaggaataggagaatggcagtgggtgatctaaaacaatagggtggtcaggagccatttcccaacagcctatgtttgtatttctgcactctgaccccacagtattctgctgctgctgctctttctcttccttatcccatccttttactccctgtttatcctctacatttttcctttttttccctttctttcagtagcagggtttggcaaacctggactggaggtaggagggctggctcccacttcctgctcggctgctttccagctaagcgacttcagggaagtcacttgctatcctgggacttattcatctttaaaaatggggtgtttgcacgataacatctttaaaaagctagaattccatttgttattcttgcctcttggttggttgatttgcttttaggcagtgtttattgacttctctgctaattgactctgttaattgacttcagggggcagacactaccgaagatggggatgagaagagcctggagaaacagaagcacagtgccaccactgtgttcggagcaaacacccccattgtttcctgcaattttgacagtgagttttgttttatttttgatttattttattttatttttttttttcaagactgagtctggccctatcacccaggctggagtgcagtggtacgatcttggctcgctgcaacctcccaggttcaagcaattctcctgcctcagcctcctgagtagctgggactacaggcgcacgtcaccatgcctggctaattttttgtatttttgcatttcctccatgttagccaggctggtctcgacctcctgacctcaggtgatccacccgccttggcctaccaaagtgctgggattataggcgtgagccaccacacccagccagcagtgaattttaaacatgactttgtgaattccacttctgtaactcttatcttaaggaaactcttcaaatcactgaatatgatttttaaaatctcttcatgcaaacgtgactttcattttcatccttgatgaaaggagtttttaaaactacagttgaaaaccatatcacatataaggtgaagggtggtcagatcactgatattaacagtctatctcatatgtgctcattctgtctagtaagcccccaaaattaaaattttaactataggaaaaaaggcaccaaaatttaaataatggttgatttcaataataattttcaggatttttggaatgagacagacctgctctacaataatattagcaaatgcttatataggtcttagcatgggctaggacctgtacatattataacttgtttaatcctcttaacaaccctgtaaggtaggtgctattattgttcccgttatacagaagaaggaaccaaggtacaggaagattaaataacttgcccaaagtcttatggcttgtaagcactagagagatttgaactcaggtagtagagctcccagaatctgtgcacggaatcataatgctctgctatctcacaaagagagagagagagagagagagagagagagagagagtgaatgtgtgagtgatagagacagagagaatataataataaaaggagtatgaatattttgaaatgtcaaagaatcttttagatgttaactgtttcccagatctgatgctgaagtagtatagaaagccccgtttctatagctgctggagacccagtttcattttaaaggtctgtgatgataagcagtaccctaaattcagttagtttataacaaaggtaatgttttcctgattgatacactttgcattgagcttactgtagtattttttaaaaataggatttttgtttttaagaccgagtctcactctgtcacccaggctggagtgcagtggtgtgatttcagctcactgaaacctctgtctccagggttcaagtgattctcgtgcctcagcctcctgagtagctaggattacagacgtgcaccaccatgcccagctaatttttgaatttttagtagagacacaagttttcaccatgttgaccaggctggtctcctaactcctggcctcaaacagtctgcctgcctaggactcccaaagttctgggattacaggcatgagccactgcacccagcctaaaaaataagttttattttacaggaaatagaactactttgggaggccacatcatcactattctatgtgctctttactgtggggaactataatagattcaagtgacccatttatcagaaacatgtattttttccaaatattccagtaaaatagcagtttacagtgttacgcttcttgtaagtaatctttatcctgtttttttaggagtctacatctaccatctgcgctgctatgtctatcaagccagaaacctcttggctttagataaggatagcttttcaggtaaaggaaaaaaaatctacatgctacacatgattacatagcatgctattttgcttctgtgtttcgagtgaatgctttttgtcatttctaacaacaaaaaccctttacatgttgaggttatttttgcatgcttgaagcaaactgctcagtcattagataaatcatcactgaatgctttaggcaccattgctgggtcctagtaatacatagaagatacttttggtactaatagatattaattgattaagtaataagaagcaccgagaaagtgatttctcatctctgtttatatacatggctgtgttttcatccctggaccctcaggttgattggtaagttaagatcctttaagtttttttgcaggctctttcaaggtatcaaaaagatgataagtttgcccatttgcctacagcaccaggctttgagcagtttggagttcattttaacctcctcctctgcctgctccccacattcccaataccataaaaccatgaggctttttcttctcttgcactgacacccagctgcttttgttgcttcggactggttctgagaggaaggctattggcaagggacaggggaggaggggagaacatgcctgtctggggatttgagtccttgccgctgaaccatggatagttcaggctatctggggagaattccagtttgggactcaaagcccagcagagtttccctgggccttctatgaaaacacctcttaacccatttcccatttgccccgagaaatgagtgctggcagcgagctgcacttttttattccaaacggaaagtttgttaaagcatttgactgacactctcatgtgctcacatcaattttgaagcgtgttccaagcactaatatttaccaatatttgtgaatggtttccttttcttagaaatttgagcagattcaaggttatctctgcaatatacatctccaacagggtctttgaagacattttcaaatattttccaccagggggcactctatcactgaaagttaaaaaaacatctttccaaagttcttgactaaagcttcataaaactctaagcacattccttgcagtttgagatagaagaattatcatcagggcaaaagcaaagggttcatatgatggctccactgctagaaaccaagcacttttggcttatacaagagtttcaggctagatattgtgttatttttcagataagtcagcccccaggcaactgcaaaaagtttgatgaaattatttagcaaggaggagaacatggattatttctccatacataatattgctttctctccattcttaagtatagtgagacaaagttttctgctgtcacagattgtaaactctatgagcatctgagcttttccggctgctgttatactcttgagacctggaactcaataaatatttgctgaataaatcgattaccatcaacattagaaacaactataataaaaactagcatttatcagatacttcctataggacaggctctgtcccaaatagctaacattccttatatcatttcatcctctcaacaccgtgaagcagatattactttcattgcatggaggaggggatcaacgtttaggaagattattttttccctcaaagttatgcagcaggggtgaagtgtgggtgttgaccccaggtgtatctgactgcagagcctcactcaaccatgagtgcagtacttttgcagagaaaaactatgggccccattaaccttggtggggacatactctaaagagtgacctctcagtacacatcagggtctcgcttcaggtgcctctgctgcagtgccagaaccttccatggggaactccctgctccctagaaaccctatctccaggcaggtggtcagagcccactgtcattatatccagaggaaaagaatatggttgcactgagtggttctggggagttagattttagccgtggccccgttgttattctctttttctgttttagatccatatgctcatatctgtttcctccatcggagcaaaaccactgagatcatccattcaaccctgaatcccacgtgggaccaaacaattatattcgatgaagttgaaatctatggggaaccccaaacagttctacagaatccacccaaagttatcatggaactttttgacaatgaccaagtggtaggtcgtttagaatttctaagataacttggggatgatggagatttgaagggatgattgtcggggaatttaaggatcactttgtttctctagggcaaagatgaatttttaggacgaagcattttctctcctgtggtgaaactgaactcagaaatggacatcacacccaaacttctctggcacccagtaatgaatggagacaaagcctgcggggatgttcttgtaactgcagagctgattctgaggggcaaggtacattgctgtgttcttcctcatgtattctgtcagctgcttaaaatgcatgttaattctaggcactgtttgcttgaactaaagtgaggcattgacatatccatgtttgtttcacaggatggctccaaccttcccattcttccccctcaaagggcgccaaatctatacatggtcccccaggggatcaggcctgtggtccagctcactgccattgaggtatgctgctccccacgtgttactcatcaaatcaaacggatgtgactgcaggacaggaatcttttgtatagaacatagaatcctgctgcatattttcttgctatctccaacttcctttacaacttgtccaaaaactggaggtattcatgggagtagaaggcttgttgaagcaacaaggacaggtcaattctaacattcctgagggcatctaaactcctcatttactgggagccagcaggtttctgagtttttcaggtcaactggagacctgggagagggaagatggacgagaagagaatgacggtgtatatgctgagagatgggggcatggcagggaggcagagatggaagttggatgggagcagtgagcaatgttgacatgtcagatacaagctgatgaccccaacaaggtggcttgatagacagtgtctggcccactctcaagactttccccgtccagtcaagcagctgttaacaccccaagatttcccttctctggctgtcctgctaagagttctcaaaggctgaggctatcacttcgaaatgcttccatgtcagacaccgtgttaagaagtttacaggtgggctggatgcagtagctcacgcctgtaattccagcactttgggaggccaaggcaggtggatcacttgaagtcaggagttcgaggccaacccggtcaacatggtggaaccctgcctctactaaaaatacaaaaattagctaggcatggtggcacacacctgtaatcccagctacttgggaagctgagacatgaaaatcacttgaactcagggggtggaggttgcagtgagcctagttcgtgccactgtaccccagcctgggtgacagagtgagactctgtctcaaaaaagaaaaaaaaaaagtttacaggtggtcatcaatataaccctatgacagataatacgatcagtcttgtttgtagatgagacatagggaggtgagttaccttgtcagcattgacacagctattagatggcacagccaggatttgattcctatactcttaactgcattgcttttttaggggctcaggcaggagaaagaaaggggcaaaaccactttctttggatgacctacaagcttactaggataatgttcaaattaatcttaaagactttgccagtaattaagacagaatttttccttttgaatattatttttaaagtgctgagttaccttcccctctctttaaatcgttttcatagattctagcttggggcttaagaaatatgaaaaacttccagatggcttctatcacatcccccagtcttgttgtggagtgtggaggagaaagggtggaatcggtggtgatcaaaaaccttaagaagacacccaactttccaagttctgttctcttcatgaaagtggtacagtatcgattctctgtgatcacccatgcgcgttgaaatatgaaagtatgtgcctcacacacacacacacaaacacagagtttatttccaaaacctgacaaatagaaaaaccctgccttatattcagcttgtcagtgactttttccccttaaattctcccactgtagtgatgatttcttaaagcttcaaaataactccagtggcacagaaatatctgtgagcaatacttacttatttctccagtaaactttccatctattcagctatctattacaagctgttggtcaaccccatgaaggcagaatattaacccccagtcatgcatggaccagatataccccctacaactgtgcatggaccagaaccttctggataaggactggctgtctggggaaggggcagctgtgggggaaggtatatggggtgatagggccatgaccttggcagcccataactgtgccccacctccaggtgcccctgggatggcaccttctttggtccattgaggctaccctatggttgttaaagatgtgagagcatcagatccagttcacagctctccatcacagaccccataatacctggggtgagaagaggccacccagtctttccatttttaaagcagttaatttcttaactttaaaaaaaaatctttcttttttactctattatataaataggtgacataaagacagtttcttaccttgaagtgttggaagacctagaaccttcctttccccaccccagtcattttcctgaccttgatgtctccaatacagtgctcttgaactctagggtcacgtgctttaaccttttattttacattacagaggaggaaactgaggcctaaagaggggaaatgatttatccagtgtcatagtgttaggccacaccttctataccacagtgactatgtcctaactagtgacagctgcagtgtagggcttggtgcattcttacttggtacacctcgtctttaatcctgcggggtgaacattttcacctctcttatgcccaccttggggaaaagcaagaggtaacagatttacacaaggggatgtcgctagcaagtgagtggccagagtttgcacataggtccttacaaccccaatgcccatgctcccctccctatcatgcgacagacggcgagccaccgggatgctgccagccagggtcccaaagtggttgtccctgggccactccacctatccttgtctactccccacacctccctcaccttccaagttctagtctggaatctagccttggtcagcagagatgagaaaaaccactcaggtgaccccagtttctattcctgtgtcaagccagagatagaaattcacctgaaccacataccaaatgggcccctaggtcagctcatgattccccaatcaggcattgtcaccaaagccaccaaattccatgagagggagccagggggagttgaggagaaagtagcaatccatttttacactgaatttccagggcaaagagactctcagccacagttatttcccttagaagttcagttttgtcttgaccatttctaaagtctgctcagaacttggctagtagatgaccaaagccctgggctagttagccttgtgcatgtcccctcccaggaagcagagcacagggaagagtatagggcagtgactgagagtaaagagcatgggtcagtgattccacacttacaggacacagcatgggtcaggtactattctaagtactcttcacatagagtaattcaacaatgttactattactcatgaaataatgggggcatggaagggttagccaggtagttcatggtggcagtgccaggatttgacccaggcagtctggctgacagctcacgctcttaagcacggagctccttgcctggcacatgagtaactgaactattgcgagtcctctgggctgtgtggcagagagaatctggactggtccatctggggaatttttctcaaagctgccctcgtctggtcttgagaaatgaaacctacctttgtgacccccagttcttgcccaaggaggaattgtacatgcccccactggtgatcaaggtcatcgaccacaggcagtttgggcggaagcctgtcgtcggccagtgcaccatcgagcgcctggaccgctttcgctgtgacccttatgcagggaaagaggacatcgtcccacagctcaaaggtaacatgcaaggctgtgcataagtctgggggcttttcttttttttttttttttttttgagacggagtctcgctctgtcgcccaggccggactgcggactgcagtggcgcaatctcggctcactgcaagctccgcttcccgggttcacgccattctcctgcctcagcctcccgagtagctgggactacaggcgcccgccaccgcgcccggctaattttttgtatttttagtagagacggggtttcaccttgttagccaggatggtctcgatctcctgacctcatgatccacccgcctcggcctcccaaagtgctgggattacaggcgtgagccaccgcgcccggccgtctggggacttttcatgcatggctctgatttactctttacaaacctactcaaggtaagtcctggattcattgtctacattttacggatgagcaaactgcgtgagttgcggtgggttatggcactttcctaaggttctatcattcgtaagtggcagagctgggctggaatctcggccttgttttaggggtgggtggcatgctcgagggattcctctctgaagcgtcctgctcctgggtgaatgtaagacttcttttgaggaagtgttaagtgctcatgaatgttccctattcacctttcaacaagcagcttgcaaagcagggagagctgttcccacatcagtgatggggatgaagtcatttcctttgcctttcactgaatggttaggaagcactcactgactgccacgtgctgttctagatatctggggacagtggggaccaagaaaggcatgttcccctctcacaaagcaaaagtccagcagggaaggcaaacgaggaagtgtgcagttgcagtccagtgtgataaatatcttgatggggaaaacaggaagctccctgaccccatgaacactgagagaggaggagattttatttcagattgctttccacctgttggcctacctcattatcacatataattaatatgtaaatgatagagcagggcataatacttactttagatttccataataaataatagctagtgatacagcattttgcaattacccattcaatagttacttgcttttagcttaccatgtgctagggactgtgttaggggctgggggctacattgcatcagtgcaagagatcccagggcccctggcctcataaattagacaccgtgggagggctggaacagcctcattcggctgatccttggtggcttcaagactgaagcagatgtcttctatttaagcagctgtgtcactaactagttccattaaaactttcataagtgtgagtactgattttacagagcctctgaaattcatctgctgtgtaggtctgactaagcatcctggatccctgattcagagaagaggaaaaaaatccacagtcacatttaagcaaaactctacatgtgcttattaagaaatgtcccatataaaacattttatgctgaattgacggtgcctaaaatagcatttttgataacaacaaggattgttgtaattgcaggaattgtttcatttgaggttactaaatggagagaaaccactttcctggctttttttttcttactgttttcatgagagaaggttttttggtccaaatatgtgaaatcacccagagggtacaaatgctacacgctttctctggccccagaatcacttacgtggacctgtttgtgtctattgctcaggggtgggctgggtctaaggcagactgccctggctagcaattctatgtaatcaatgtagagtgtggtcaaggcttcagagagccccagaaaaggaaaatctggtcctttcataaaaccagtgataggttaagagttgagggcacttggatggcctcatgttggaagcacacagaataactttctcctcctgtcccttgggctttgtttccatgaggagggtgaagtggagaactgatcctctaggaaagaacttatgttcagttgtgttcctgtgaccctgccctctggttgtcttgttctgtactgttggacttgtcaggatctgcaggggagcttatcttggaagtgtagagactgcttacaggtctaggggtgccacgtggatctaaaactacctcacacagtaactgatatatcacagatgctcaggaaatgtcagtctcccctcctccccgctatccccctgatggttcctccaggctctggtgtggtggttaaaacacaagctttggagtcagccaaacctaggttacttactccccaacttaccactaattgtttcacctgaagcaagtgacttgcttgctgttagcttctgtttgttttaaaatttttaaaacagggataatggcacatattctacaggactattgaggtactaagtgaggtcatgtaagtaaagtgtttagctcagtgcccagcacatggtgggtaccgaaaaaggtttgttgtttctcctcctttatgtcctgtatgtcaattgccagggtggttaagcagaaagttctgttggcttggcagagtttgttctgtctaggttctggccttctgttaaatgtcttcctgtttggtgcttcctcaataaatgggagatgtacctctcatcctacccccgccccagggtgaggctttggtatcccccacccctttagctgaatcaaatgtagtaagcccagggactactcctgagtccatgctctaacccccaaatcctgagtcacagatattctgggaattgtacataaagtcagggcatgtgtcttctccctctgcatacgctgttgagaataagggctgaataagccactgcaacctcaggcctgaaatatacaacaatccaccctgcttttcttttcctttcctttcccttcttttttttttttttttttttttttttaatttaagttctgggatacatgtgcagaacgtgcaggtttgttacataggtatacacgtgccatgttggtttgctgcacccattaacctgttatctacattagatatttctccttcccctggcctctcacccctcctttcccttctttttcttatttttctcttctttattttctgtttcttaggaacaaacttcaagaaaagaagactcctttagatgtaggctctctgtatgttctcacttataagtaggagctaagctatgggaatacaaaggcatgcagagtggtacaatggacattggagactcagaagggggagggggataaaagactgcatactgggcacaatgtacactactcaggtgacaggtgcactacaatctcagaattcacaaccatataattcatccatgtaaccaaaaacctcttgtaccccaaaagctattgaaattaaaaaatgtcggttccccacttactcctgcaccctctaaagacatgtattgacacaattgttttttgagcactttctgtataggcactggactaattgtctaaaaacagtaatgaacatataatcccctagaaaatgtctaaaaccatattatgtttggggaaacgtgatggattgttggtttattttctacattcaggagttgtcctctctattctgtaagtcccatccaagaataaactctaccatccaccctatggctgttaaacttgaacttggagtagaatgttcaccactgtatttctctaagtatcttagattaagaaagtatttgtcttgcagcctcccttctgtctgccccaccatgccgggacatcgttatcgaaatggaagacaccaaaccattactggcttctaag

SEQ ID NO: 599 - DNA, 317 bp, Homo sapiens
agcaatgaaatctttctctagaaattgctaaatatattatatctccgtcatcatcttgataatagttatgtaacacccactgagcagaactaagtccattgaaatttgtagaaagttgaaagatgttccaccataagacaggctaatataaaaagcacctggtaactaacattttgagaaattattatgcttgactgtgtcaggcagtgtgctgggcactggcgtcatcttacttaatctttactacagccctacaagggaggcagtggcaagaaggatctgagatttgaccctacttgcaagcgaacaaggtcccc

SEQ ID NO: 600 - DNA, 15531 bp, Homo sapiens
ttttcttggatgctcctactttatttttggctacatcatcacaaagaaagatgctgggtggttgtgcatgcaccggaggacgtgtgtgtattctaggcagggaggtggttacatttgtcggggacagcgggcacccagactaggggcactgtgagcttgctgcatgctgattccagcgcctacaccagcatcaggcttgggcgacacagccagcatgctgtctcctaaggggaaactgtggtgagggaggtgggctgagagtaggtgccaccagggactaatggggaaagataaggtcaaaaggaaagatggcagccaggaagctgttggccaccttggggaaggtgaagagctcgatgtttagaaaatggttattcaaggcaagaaatgagtcctcccatgaattgtgcagggagctgagggtggagggcgttgaaaagttaagagatgtgatttggggaaagtgagagtttgagtatctgtctgatgcttctgtagagaatgtcaggggtttgggatgactgggagtgattttcatgagggaagacttcatcaaaattgggaaaatcgaacctttctcacagggcattgaagattgcctgacttcaacctcaaatttgtaatgtttgcccacattgccttttcctcctttataaaataattttttttataggaagaaagtgaaagattgatgatgagcccaaagcctttggcatcaggcctgtctctctctactgttccatagccatgatattatttgattctcccaggaagcttagtaacgagagtgcaggagacagagagacagacaaagagagacagagagactggagggggttctgagtgagagatgggatgcaaaagagtcaatgaaacagagtcaagggcattggggaggagggtagcttgttcatttacctaagagcggagaaaggagaaaggctggaggctttggctgaggcttcctcagacccatggccctggtcttctaaatgcctccgtgcccacccggggagcccacggatgagagagtcctctatggggcatctacacagcttgagggatgctgccatgcactcagggcagtgccagccattggcccaagccctgggaatgtctggttctgccaacgggaggagtgggtcagttaagaagcgtgggcccaagtggaatctcaggtttgggccagtttctcagtttcctggtcaggctggtgagagcaagggggtgaggctaggttaacatacactttttttgctgttgtttttgcggtgttactgctttagagagagagaaaggcaaagggaagaaaggcagggagagaaaggagaggggagaggctgagaaagagagaatctactatcatggaagggaaagaagagggaggaggagaaaaggtgacagaggaagggttttttgttgttgtcgtttgtttttgttttgctaggaagcacacaggtgacattcggaaagaggagagcgtccaagcccctggtgaattctgtgcatttgcatcctggtgcacttggagcagggagggtgtgttactgaacacagcagtctgttttcctggcaatcagggtgtacatctcagggggcagtgggagcccggaggctctatttgtgccccaatgcttctctcacagcattgtccgggtctgctgacaactggggatatacagagacacaacacagggaatgaaagggtgtgtgtgtgtgtgtgtgtgtgtgtgtgtacatgtgtgtgttcaaggctaggagggtctaaaaacagtcctaaatgatgaagaacctttgtaatttacccaaactgagaggttattaaatgatcaacctctttgtaaacgtctccccaaccccatccccattgctccatcccagggatgagagaggggctgtattcagagcccacatcccagcatcagggaggagggagtctttggcagcagtgcccaacgtgacgggggctcaaaggcaggctcagggagatcagcagggtatggggggaggtaggcatagagaagagagatcagggtgcggtgggcagctagagcaggctgggggggacccgggacatggagatggggacctgggcactagcctaatcacttgacacgtggttctcattctgtagctggtgccagcgctctatcttcttgtctttatttttcagacactcgtaccagtgttttaagcgctctcccttggcagagatccccagctggcagcctcctggaggataaatgggaagataggagcaggtggtcagaatagaggtcgttctagacccaaatgtgtagttggggaaaaaactgcaccaagcagtgacccccagcaacctgggatccatactctatagagagttgttataacgttgctgctgttgttgttattattattacggtccttctctgcctcaagaacctgcaatggctccctactgttccactgagtcataatttcactgtctatttttaaaggctttctacaaatcaccattctactcactgaaacttatctcccactacttctgggaactcattgtctatttccaaaaaggttcatcatcctgctcaatcctgtctttaccccttagctcaggctctgtcccttgcctggagtccccacccccctgcttcatctttaattgattttcttcctcatgattcaaacaggaactaaaaaattaaaaattttatcctggacatgcaaataaattaagaattcttttgcaccctgctttctgcagagaacgcaaatctctcctgtgatttaattaccccactggaggtgatttgttcaacaaataatcaagttttgtaaggcttttcatgtaaagacatccccaaattggaccaaggtcaagatcatgggtctcaatttagcatttgaacaatgaggttgccaaaagaatagcaatgacctcaactctctgtagccctggataaggctctcctgttctggggaggacagaagagggcgttttctctggagttaggaacactcaccgatgtaatcattggacttgccgatgtcatagtcccagactgaaatgtccagtgacttctttgccaggtcactgtgtttgatgtcatagaaaaactcctgaatacaacagaggaagacatgtgggtaagagccctctgaacccacagcattgggaggtaagaggccgagtcctaggggttatgggccaaggagaggtccttgagctggcattctgggagcaaggaggtcttcccgtgccgatcctctgccccaggtcccgtgatccccttccaacaaacactctgtgtaacaaagcactgtcatcctcttttcagtgaattctctgcttgaaattgggaaggctggtgaggtttttctaatagagctcaagtttccttgtaggtaaatggccatgaacatagtccttcccctctggtagtttatgaaggggcatccccttttttattgcttaggaataaaagtagttgaagtggccgggcccggtggctcacacctgtaattccagcactttgggaggctgagatggtggctcatttgagctcaggagttcgagaccagcctgaccaacatggtgaaaccccatctctactaaaaatacaaaaattagccaggcatggtggtgggcacctgtaattgcagctattcgggaagctgaggcaggagaattgcttgaaccagggaggtggaggttgcagtgagccaagatcacgccactgcactccagcctaggccacagagtgagactctgtctcaaaaataaataaataaataaatacagttgaagtggactgagtacatatgttcccagacaatctgatttttaaaaaatagcttctctgcctaattacaaaattcattttatgttcattgctaaaacaaagaagaacccccacccccaattcccggtaatccaactacccaagaataaccatgtcaacattcccccacatgtgttcacagtgatgtataaattttttgttaactaagtaatgctgaacatacagtattgtcacttcctttttcatttacaactttgggcaaaaaccaacttagcatgttctcaaatatttttcaaatatttttctacatcatcatttcaaatggctgcatttaatggctatgtggccacatatttaatggctatgtggctatttgtgcctctctaacacacagcaaatatcccagagcatgaaaaagaatagggcagccttacctcattgaattcgggattcaaggttttctttttaatttgagtcttgtgtttggccttctttcccatgtccggtttcagccagctgggaggcgacacaacatgctattatggatgacgtttaatgaataagaacagcctcttgaccccaaaggccccttctttatcagggtgaattgatgaataaatcagaaagggatcaacattgataatgaccaatatgcattagagcatctgcttggtaccaggcacttgactgagcaacttaggcatatttaatccccacatgaccctaggcagtagaaccacaaccactcagtttacagaaacagaaactgagatccagagaggcagaagtgtgccctagctcacacagctgggattgaatccagatgttgcatctagagtctgtgttcttagcatgctcactttctccccataagtcaaattgatggccatggctggtggtgcctggcattttaccatctatcccaccttaggctgcccccaatccctagagagaggctgggtgtatgcacagaaaggggaagatgcaaatctgattattgtcactccacttctcaaaactgtgtactgggttccttttaaactcaggggagagttcaaaatccttcatgtggccttaagaccgtgtgtgttgggtttctgctccatcccaacctaaccttatgccatcctcctcaccccactccttacttctcctttccacccaagggcctttgagcaaactgtttcttctgcctacagggctcttttccagtgaggcccagtgtctggcacatagtaggtactcaatcaatattttctgggtgaggctgcgtatggtggctcgtgcctgtaatctctgcactttaggaggccaaagcgggaggatcacttgagcccaggagttccagaccggcctgggcaacatagcgagagcctgtctctataaaaaataacaaaaattatctgggcacagtgatgtatgccttcagtcccaggtactcaggaagctgaggtggaaggatctcttgagccccagagttcgaggctgcagtgagctatgatcacaccactgcactacagcctgggcaatagagcgagaccctgtctcttaaaaaagagagagagaacaaaacacaaaccaaacaaaacaaaatatttcctgggtgagtaaacacaatgggctaaacactcctaagggctgggacatttggattctgattcaggttgtcaccagcggagcaactttaaacatgagcgtaactttaccgtgcctctgtttcttgacctgtaaagagggcgaacatttcattctcatctacagaagtggttttgaggataatttttaagaagagacaaaaatgaggaattagaagttaccaaagagctaagcaaaaataatgggaagttctggcttttaaaaaatctttatttgatcagaaactgcttagtggtctcccattttttctcccataactgcacccagcaggtcagctgcttcagtagtgaccacggcaattctacttcttctggaaggattgggtaggtgggggagggggtggtagagagaattatttaagaaaaccaatctgcacatggctgacctctaatggagtgctggacagcaccccttgagctcatttcctctcttgggtcatacgaggaaataaaatcaaattactcttagaaaccaaacttgtccctgacctgtgtgttctttgttaactaaatcttcattcaaaggaaatgtgaaagacagcccacatggatctgttctttggccatggactaaagggaagtattgctttctgttatcagaggcagtggaggtggggggagtgtctcccaactggaggggatattagtaaatactctctgccatgagtaaggacagtgatggtggttatttataaccataatggcaggtatttattagcatttactgtgtaccagaccccttgaaaatgtacctctcagcctgcattctccagttgcagggggtaaaactgatgaacaagctactgggctctgtattcatgatgttcttgctgaagccacgcttcccacaagtgttcttagccaataactgacgctagcagggacactaggcagccccatttctgggaaatgcaggactcctctgatgggtgactgtgctcaaggattctccatcaccttggatgaaatagtgcagcttccttggagctgcactgtagcctaagattgtttctacccaaacttccttccttctctgctccacaggggtcatacctgtagcaaggtctgtggtctctatgggtcccctctggattcctccttatctcctctacaggcacacctgtatcttctcttggtgtttccttcttggaggacctgaactaatatacagtattacagtattactctgtccattttgcagatgagcacactgaggcctagagatgttaagctatgagccccaggtcacatagctagagcatactggagactccatgctccatggagatccacatccacagaaacatacatgttgctgccccaaggccagcagaattctactgaggtgctaaacatttctgtaccaggctcgattctgtttgctttctttgtgctatctcatttgagccttaagcccaccttggagataagtggaactcttgtctccattttaccaatgaagaaactgaatgagaagctaaataacttgcttagagtccacagccagcagctggcagagatgagaatagggcctgatgtctgacacagcggtggctatgagattgcacctggcagacctccagctacaggaagcgtaactgaccaaggccctggatgcagtgcttggaagtccatgacatatttgtgccaaggccatgctcccagccaatgactgggcctggcagggatgctaaggtcggcccactcctatgagatacaggacatgtctgatggccagttttggcttgaggactccctggtggccttactgaacttgtatctggaatgcttccctccaacttctctatctagtcccctcactcaggtcagacttgcattgtagtctaacatctctccctttctcccctgactccctgcagacttcctggaatgggcatttcccctgataaaccccttgtctgcttaatcctattttggcatcttcttctcagaggatctggactaacacagataacagagtcccttttattctccatgatgagattgctggaacagaccccagactgaaggcatgttttttttctgagcatttccagaatgaatctggaaaatgccagatggcctctttggtggtggaggtctgagcggtccgaggggtgtgcggccaactcctgggagtacaaatggggctactataactaattagcttagttgcagagccatcagcaggccctcaagaggacagagccacagagctttgcctgtgggcaagtgacacaccagtttgactgcctgagactccagacccacattcttgccagttgtaggcatttgtttcactgtgaccttgggcaggttccttgccctctctgggtctcagtgtacaacgatcttggtgaaactgtctggttctccttttccaaggctccaggactccttcagggcccacctgtagccccaaggcattgacttacagcttgacgaatgggtctgagtagccattagcgtccatggcagccaggtgcacgcagcgtatgatgcccacaatgaggcctccctgctgtgtgctgtacatgagggagaccaggatcttgccacgctcctcgatgtcaccaacacgctccacctgctgcattgggggaaaaggcagtgtgggccttggaggggagggggccaggaaatgtgaatggcgagcattagggaagaacctatgaagggcaggcgaagcttggccagctctagggagccagtaccagggacagcagatggcttagcctccaaagaggagccaaaggtgaaagttgaggaccagtctcaggcacatggggaccaatggcttccctttgacttagacataaacagactctgactgtgagcacagactaaacttgctccgggtcactgattggctttggctctaacccaggactgagccttgaccctggccccagacagattcttgcctctgatctcagactcccttaacacaaccagtattcttaaagggcagtccttggggtcatatgagggacccaggcagacagcatgaaggcttagttcagtttctgccatgcacacagctcaaagaatgcatctactccaagaaaggagtgtgccattgccctagtcagtagaattgtcaacaaagcttctgacaacaaggccaaaaacctggtgggcatcctgggtatgagagaaaggggcttccccctcctcagaggcttaggtgtggagaggacatcacttgtgggcaaagggttgttctcaaggcaaatcaacaggggggtggttggaagagaatggatgaggaaggggccagggagggagagaagaggaagatgctagcctagcccagtacagaccctgactgtggcttcaattcctgctcagtgctcacctcttcctcataaagggccatgcctcgggctgacccggtggtcccagcacgtttcatcttaaaagaagaaaacaaataaaagataacattgtctatggagctcatcttcctgcgcaagaaggaccagaaacccctcatacttccattaccatccagagccatgaaagtgggttcttaagctactgtggctctcctgcattctcccttttagctaaaatttataaaacttagccatatggcaagctatgtgaatgtgtaacaacctatgatataggttctgttacaattccaattttacaaatgaggatgctgagggtccgagtagttaagccccttacccaaggtcacacagccaataagtgtcagagcattccacacacaaacagacaagatttcattttctctggttgaagtggctcaggggtcttggggtctgacccaccaggtgcttttgccttcatggcccctggggcccttttgctgaactctaggctctgggaaacagagttagaaaaccattggttaaatccaacctccccactttggagaggaggaaacctgaggtccagaggggaggggccctcagtgggacataatgggggaagttcgtggtgcaagggttaaggtttaatggcaaagagcaaaagaagatgatcagtagtgttctgcggctgctgcagccctctgggtgtcctgcacctccatgtctctggggctggctgcattcaccatagcaagatgggaagacccaaaggctgatgacacaggcaagggcctggccattgtcctggccaactggactcacggagttggagaaggaagagaagcctgaagacccagctgtcaccaggcaaaagcccagaagaagggcctcattcctagggatgtctttaaggatttattctgagcctggaattcagtggaaatccttccttgaaattttccttgtttggtcttgttcctttgcctgaactataaaactatggcatggcatgcagacattccatcctcaggctggccatctggtgggaagatgctcctgcaccccatagcttccctgtggagagcaggcaggctgcccagagagaccaggggtgctggtgttgtaggagagctggactctggccagtgcccagagaccttggagacttgctaccctttctgggcccaagttggcccatacgtaaggcaaggcagcctgaattatctctaaaaatatagattgttgagtcctaccctaccccactaaaacagaatctccaggggagacccccacaaatcttagcttgtaaagctctggttttagaatcccccggttaattctgaggtgcaaccccattgcagaacctcactttgatccttgctattttctcaaagagcaagaatcacatctgacaacaacaatgacagttctaatacttcatatgtattatcacattcaatccttaaaagatcctatgaggttagtactacagtatcccattttacagatgagacatctgaggcccagagaaattaaataatttgcctcaggttataccctaagtggcagagccaggattcacacccgagagtctggctgcagagcccatactcttaaactctaggctatgctgtctgctgtttatctacatggtgctttctgacttcatgactgacaggtgggtaaggcagcaatatttcctacactaacaactgttaatttatgagtgcttactatgcattaagttctattttgattatgttattttttaaaacacaaccctcccaagaggcaggtactgttataacacccacattacagacaagaacaccgaggctcggagtggttcagccccttggccaaggccatggagcagcaagtggcagagctggctctgaacccaggaagcccatgctgcccctgccatgctgtccatccagtttggccaagaagaactcatgttcgaagtgatgctgacacagggtttgtgaaaggcagagagagaatgcagcctgaggttgtgagctggaatcttgactctcctctgcagacctgctgcagtgcctctgctacccaataccccgtggatctatttcccccaattcagacccagaggaaggcagctcccccaatctcccctcctcccatcagatcctcagggtaaagtcactcacaggaatcactcgctccaggcagatgttgaaattcttcctctggttgggcttcagtttcttgagggagaatctggtctcaccaataaattcattgtggccaaatttgtcctcatcacagacggagatcctgccaccaacacaagggggtagagagagaaacaggaacaaatattaagacaccactgtgtgccaagagttgcagctgatactggtaaggaatgtgtaatgtatgtggaaataatatgatttcctgtttatttatcactggaccaagtacctttaacttcttctttattgcagtataactgacatgcagtaaagcacataaatttagtttatagcttgatgaacccttgcatttgtatatacccatgtaattcccacccaggtcaagatataaaacattccagagactgaaagatcctcaggatcctttctagtcactgcctgtctcaaagatagccactcttttgcctctggccacatgaagtcatttgtctggtttttgaccttcatataaatggaatcatataatatagactcttttatgttggcttctcttgctcaagattatgtctgtgagatgcatccatgcacagtataacttatcctttttattgctgcatagtattccactgtgtaaatgtaccataataattctgctgttgatacaggttgtttctagttttgagttattatgaataacgctgctatggaatatttatgttcatgtctttcggatatacatgtacatatttctattgagtattttcctaggagtagggttgctggccatggactaggcataagtttagcttcagtagaaacttcaaaacagttttccaaggcagttccaccaattatgtccctaccagcagtttataaaggttctggtcactctttattctctttgacttcaattatgtcagtctctaattttagcctttctggatgggtcatagtatgtcactagttttaatttacatttccctgatgattaaaacagttgagccccttctcatatactttatggccatttgagcatcctcttttgcaaagtcaggctaggaacttttctcatttaatttttcctatttcaaaacaactgcatttaccatttagagaagatactggggcccagaaagattaaataatttttccctaataagaggtagaaccagggtttgaatccaggtctccctgaatcctatagtaatatattgccttttgttatctaccttacacagcattgagtaacagtggcacaaaaaaggcaggtcataagaaatgtcccttaggacaagagtctccaaccctcaggccatggaccagtaccagtctgtggcctgttaggaacctggctgcacaggaggaggtgagcagcaggtgagcaagcattaccacttcagctccgcctcctgtcagatcagtggcagcattagattcttacagaagcataaaccctattgtgaactgcacatgtgagggatctagtttgcacgctccttatgaaaatctaatgcctgatgatccaaggtggaacagtttcatcctgtaaccatccttctccctaccccagttcatggaaaaactgtcttccacaaaactgttccctggtgccagaaagattgggaactgctgccataggagaccaaaaggaccagtcacggcatgataattcatcctgacaaacactaagagaggaaagggcttattgtcctgcaaggcatgggaggcattcttgggggacaggaagggactgtaaaagtaccgcactccttggccaccaacattagttgaacaaatgttcaaagtcctggagggcccaaacaccctcatagctgagtcctgcactgtctaacactggagaaaaaacttgtctctactgagctggttggggtgtgaacaatatcatccttcttcagggcaacgcatctccaaagacataagagaataatcactgtttttgaccctgtagcaccacttataggaatttacctcaaatatatcataaggcaagtacaaaaatatttaactacaatgggtccaaaaaatagttagaaggaataaatgagatctaatatttgatagcacaacagggtgactatagtccataataatttaattgtacatttaaaaatagtgaaaagagtataatttgattgtttataacacagggataaatgcttgaggtgattaaaaaagacatttattttaacccatttaaaaaactcatgatgcgattattacacactgtatacctgtatcaaattatcctatatacctcatgaatattaatatatacacctactatgtaccctcaaaaaattagaaatatatttaactacaaagatgtttgtcacaatattgtttataactatgaaaaaagcagaaataacaaatactgtacaatggaggaactgcttaagaaaattatgaaataaccacaaaatgtaatagtgtacattagagaaagtgttgtacttagtcatcagggaaatttggaaccacaacgcaacaccagtgcacacctaccagaatggccaaaatgaaaaagtgttgatgaggctgtgaagcaactggaactcccatgcatggctgataggagtgcacactggcacagccactatggaaaactggcagtttctattaaagctggacgtacccatatcttatggctcaatcattacacttctaggtatatatgcaacagaaataagtgcacctgtgcacctagaaacagctactagaatgttcctagcagcactatttgtaatagccccaaactagaaaccacccaaatacatcaacagtaaactggataaataaaactgcattatattcctgcaataaaatactaaatagcaacaagaatgatctacaactacacacaacttagatgaatacacatgtaaaatgttaaatgaaagaatatagatacaaaagagccacacaataaaatttcatttatataaagtacaaaaacagacaaaattaacttgtcctgtaagatgttaggatattgaataccccaggggagcattcaataagaaggggccacagtgggggtcttctgcagtctaggaatgttccattccttaagcccagtatgttcactattgtgaaaattcatcaatctgtgcatttatatgtgcattttgctaaatgaatgttatgccgcaataaaaatatttacttagaataatgttgcagccaattgggaaagcagtttgcatgtcttgtaaaattgttttggaaaacatcacatatcccatgatccagtaataattctctttggtttctgtcctaaggaaacactcatatgtacacaaggaagaataaagttgctcattgcaactttgtttgtaatagaaaaaagctgaaaacaatttaaatgtccacccaaagggaattggctaaataaactggtaaacatttacacaaaaatttaaaacatgccaaacaatgctgtacattgtttatagatacataattatgaagtataagacatacttgagaatgatacccaaagaattcaggatggtgtctagctcttgggagagaaggaagaggacaggacagggtgggagatagaatatacaaaaggagcttcaacttgcatcgggggtgctttatttcttaaaaaagagctgacgcaaacacagcaaaatagcaagatttttaacagatcaagtatcgggtgggttcatggatgtttgttttagtatattctacacttttctattcatttgtaatatttaaggataagaacatttaaaaaaatctgtgataaatccattctgtggaatattctgaggcagttaaaaattaggtagatttaaatgtcttttcatggctgtaatactgagatatattgttaagaaaaaaaggcaagttccatacatatatatatatatggaaataagtgcacctgtgcacctagaaacagctactagaatgttcctagcagcactatttgtaatagccccaaactagaaaccacccaaatacatcaacagtaaactggataaataaaactggataaataaaagtggatatatatatatatccattacttctaatggcaaaaactgcaattactttcacaccagcctaataattcaacactgtagaagaatgtgaaatggcatcagtgtattcttaagtgatacagatgtactaatgagatgatctattgtaataaacatttttataagcactcaattttattaggaaaaaacttttacatacacacccacacacgcaccatcccccaacacacaccccctgaacgaacagataccaagatgttaacagtaaacagtttcaacttatctgtattttccaaaagttctaccaaatatatatatcattttttggtaaaagtaaacaagaaggaaaaaaataaactatgtagagatctttttagagtgaagccctgggggcctcaccccaagtctcagttccacccaccccgagtctcccctttgcctccctctctgccctctgcctgccaggtacctgagggtcttcctttgcatgtcctcatcggtgatgccgtgatacacgaggg

SEQ ID NO: 601 - DNA, 14001 bp, Homo sapiens
gggagtattattttatatttgggtggacttgggtcaatgccactctaaaaaataaggtgctagctctctgtgttgacacaaaaatttcataaaaccgctattgggaaagaagttttggatgggagcaagaaagctgaaaatcttcaaactgtaaatttcatttttttctaaaagtttacaatatatgcatactagattatgattttagcagtttacttatatacttcaatgattaattgttttgcaggccatcaccaaaacatcattgaaatggttcactaggttcatcacatttggcttctaagaaaccaaacctactgtgaggtggctaccccagttcatttttttctcagactggagaaaagttctgtatccagtcttgttctagatctgttgagtgacttaccttccacttccccaccagaggcagcaattttagagaggtgtagatatgttgttccaactacatcatttttagtaagacggtccctgtgtaaaaaataaaaataaaaaaataaaaaataaaaggttcagagctccatctaggaagatatgtcttcatttcaacaattaaaaaaaagttagagctggaaaataccccagacttcagaaataatcacgtctagtgggcctcaaactttattgtacttagtaatcaactagagacttctcaccctcatctcctgcccacatttttaattcaataagcctagagtggggactaagaatttgcatttataagtgtatcccaattgattctgatacagatggtcctccagtcaccctttggaaacactggtctagtaaggtaatttattctgaagttatgaaattgcaattgtacagagaggccaagagatgtgcctatggctacactcaataccattgtcataaaatgaattaatcaattataggcacattacataattatgattgtgatgatcatgatgatggtaacgatatttgtcatgtttccactgtcagggagctaagggtgcctgctgaatgctacatccaactagaacattccaagaatggtcttgttatggccaatcagtgctagaaggctggtctactaaaaattctatcagaacatttcaaggacttttccttgccttcattgaggtagttttaccattttctttttaaacaataacaatgaattgctctcagaatgttttggtgattcttcccaagaaatgcttgactgtatttctgaagtctattctggacagcctaatgatatttaaatccctgatttcttatcttggggcattttcagcacgttccccttcttttgtttatgagcagttgaaccgaaataatcgaagctttttttgcagtaacactattattaaattttgttttaagaaacacccggttccaggagcaatttatcctctcctctggaaggaaagcaaaataccagaaagagacaatccagagtaatgtttcacaatatccaatgtttattttatgttgaattagacacatacgtattttcaactcaccagtcatatattgttagttttattttttcacacactgaaggaaactaaaaaaatgagacagaaaaaagtagttatttctcaatgatttagtaattattaagtaagtattcttactttttcagaaagaaaataaagtcaaaccttgatctgaagattgacgacctgattccactctgggtttgcatttttctcaattatgtttgtacaaacctgtaaaatcaccaaagcaaaagtgtaggttttcaagtttctaatttctaaaagtttacaatctatgcatactagattatgactttagcagtttacttatatacttaggaacctggttaaactttatttttcttgatgatttgtaaaatatgacatgggtttaatattaatcattgctgtttcgaggcactaggagcttgcttttaacctttttttaattagttttcaattgtcaggcttctaacattagattaatgtaaaaaagcaagagataaggttgatagagcatttgttacataccgtttgggaagcatctaccattaacacatccagacagatcttttgaccctgcccgccagcctccctgccctctaccccaaactgactcttgttccagtctttccatcgctcttcattcaggtggtcaggctcagaaccagaatcagccacaccctgacacttccgtcttcaagcagatcctggaatgtcttcaagccgatcctgaaatgtttctccccaggacacctgcggttgtctatctgaactccacaccctctcttgcctcctgactttcatgtcacttctgtgtaacatcttcagggggccctcaaagtacacttcaaataaagccccaatccttcactgggctgatgaagccctactgtcccaaccctacttctcactgacctcctagttttccccgcttgctggctctatcgcagccacatgggcaggccttccctgctaacattttcttccttggggcccttccatcgcccttctccctgcctggatgcctccctccccgatccctgcatatccaggcctctgctcaactgtcactttctccaggagtctcacctgataacctggataaacactcctcccctgcaccaatcacttcttgtccctgctttgttttctttgtagcactgggcaccatttaaaattattcagtttcttgtttgcttgtttattgtctgtctcttctattcccatgtgttcgtttctatatcccagcacatgggacagaatctggtacttaatgactttttgaatgaatcaaacctctcaacaatcctgtgattattattatctccctttatagttcaggaaatggaaactcagagggtaaacgatttgcctgcctatgaagtggggtaaagcctgaatttaattcaggcctcattttgccccagagctgaaggcttttctaccacacccactgaatcttttagaaaaaagcaccagtcatatgtgtatgtgtatgtggtttgccggatcttgctttcataattatatggttcgaacacataaaagatgctagttctttttgtctataactgtccatgatgtgctattattctactgtagaatctcacccaactctcaactctctaatctttgaccatctctgtaggtaaaagtggtggttatagctgtccctacaccaagagtctcccagatattttcaggggagtgggatggggcttccctgacccattctctggtttcaacagtttactggggcatggagggtgagaaacatgacaggaaggggcaacagggcactggggggggatctccgtcctacaacatttaccagggatgggtgtggctggccagagagcttgcctaaggttaagataacgtttggacctgaaaagcaattccagaaattcagtggtagccttccctattttaatctctcaaaagattgaattttctaatttgtgttctgcatactttccactccaaaataaacctgtggagaagtctggcgtgttcagactcagataatctgtgttcccgcagagtgcctggctcatcagggggctattttaacaaagagtaagcaggaattcactccaaggaaagcacagtagttttagatatttattactagcagcatctgcatttagatcatgtacaaaccttttttccagcaaaggaaacttctacaaaaggatccacgagatttttcttatctgcattgcctccaaatatttcctttactgtctgtgagaaggcatcatccactggaaggtaatagttatacagcagaaattaaattcaattcccagaaatttggcaaaattttaaaagttctcttatacatcaaaatagttgcaacaggctaggcgcagtggctcatgcctgtaatcccaggactttgagaggccaaggctggtggatcatgaggtcagaagagcaaggccatcctggtcaacatggtgaaaccccttctctattgaaaatacaaaaattagctgggtgtggtggcacgcgcctgtaatcccagctactcgggaggctgaggcaggagaactgcttgaacctgggaggcggagattgcagtgagccaagatcacaccactgcagtccagcctggtgacagagcaagactccatctcaaaacaaacaaacaaaaattagccaggtgtggtggcacatgcctgtaatcccggccacttgggaggctgaggcatgagaatcacttgaatcttgcagttagccaagaccaagccagtatatgccagcctccagcctaggtgacagagtgaggctctatctcaaaataaaataaaataaaacaaaaacttgatcttttatggaggaaaaaaaatacaacaaagttcattcagtgagagtaaaagatgattctcaaactcaggcctgctttcaattgggagaaaggtgctctaggtcaaaatgatatagtcctagtctgtttcagagaaattcaagaaaatttgacataatcacaaataatatatttaatcaactacaatctatagttaagctaaaaagtaaatagagatcaggattttaatttaccttattttatgtatttctttcttcttcttcttttttttttttttttttaaatagagacagtagtcttgctatgttgcccaggctggtcttgaacttttggcctcaagcagtgctcctaccttggccttccaaagtgctgggattataggcatgacccactgcctccagcccatttgacacatttttgagagaaaggtgggtatggggaggccctacaatactatcttttaagaccataggatcttaaaagaggaaaaggattcccaagaaaagcagcaaatcctgaagagatccatggcctgtatagtgagtgcagcctcctggggacttggagaagggtcccatgtcccagagcccagcaggaaccagacaggcccagcaaggcaaatgggaggctgggccatcagcagtgacagagggataaccacactagttcctataaatggaatcactagaagcgatcccttaaatgcaaccagtctcttgctgaatatatttcataatacaatagtggcagacttctagtcattgggacattactaccctttgctcagcatgtttttttttttttttttttttttgagatggagtctcactctgttgcccaggctggagtgcagtggtgtggctcacggcaacctccgcctcctgggttcaagtgattctcatgcctcagcctcccaggtagctgggattataggcacccgccaccatgcccagctaatttctgctattttttttttatagctggatagcaaacaccttgatttgataataacagttcacattttcatttgggataaaaggggttggaagtgctgactgctcatatctctttagcatcctctagaataaagagaagatatagaatagcaagagagagagtcaaatgggccaaaggcaggtactcaacaaggaacatgatcagcaaccaactagctgtgccatgagcctgctcaggtagctttcaactgggccagaatgaatgaaaataagcccatgaagccctttcagaagaaaaacatacgatagggacacgaatcactattaaagtttgatttttaacacatttcatcacacacataatcaacaattctggggcaagattaaatcagtacatactctgggggatgtcctcagctcggtagattttcagcaagaaggtcacccaccggagggcaatgccagcagggagtaacaaattactctccacatcatcactgtcattatcacgatctcgtctctcaggctattaggggcacatgatttaaattatacatacagaaaagcagcacttggaaaaagccaaattaatgcttataaaatgaaaccattcagaatcgtttccattaagatttcctgtgtttggggcttaagagttcagcctgccatcagccaccagttttccttcaacctcaaaactgctccacaaaatcaatgctcatgtttttgtatcattctgtcattttatgagcaccaaatagtaagagcctgtgcgtgtgtgtgtgtgtgtgtgtgtgtgtgtgttcctgatgtcccttcaacttctctctggccacttatattctgcagtttgccacccagtttcctagaataatcactaactatttaggtagcaatgcctaattctgcaagtaggtcatgctttctagataaaagcagtctttctaatgaggcaaggacgttgtaaaaacacattcatcgattctcaattaaatgctcactcatagacatcagataagagtttaagtaagctagaacaataattccatgatgaagaaaagaacagcttctgaagaatagggggaatctgagggtattgacgggaagctgtgctccatttcacaattacccatgcccacatgcttaactcttggccttcttttttagtgagaagtgtagaaagtagagaatgtagggactcacaggaggctcatctccggttcccaggacaaacatgctgactttcatataacctttagaacctgaactggtatcttccgggtcattgagaagaagccactttctcatgacagcatggcctaaaatagagaaggagtaaaaggaaatggacatgctaaaaaggtactgataagtctgtgattcctctgccataagataagctgcattttcttggaagcctcttcacgacacaccaaattccccagatgagtgtccactttcaggtcttctgttttgtactctccctacaccccacccccaccattctgtcctcgtgtaactcaaacaagactctctaagttgtaccaacgagttttataatttaattttgataagatcaaaatatcctcacaaaacatagaaatcatctattttgaatgttaagataaaaaattagacattttttctaagctactgttatttattcccactaagtatcctctcctctccctcattaagaaaatatttttttaaaaattcctttaactttaattctttgatccccccaaattgtcttgattcttagaatcatcttcagagttagaaggaatgaatttaagacttcatattgatggggagaacattacttaccaggttcatcataaacaaatccaacatcaatctgggaaaacaataatcgaaagtagtctaagtagattttaaaatcagtctagtcactttaaagaagccatcattatatttaaatatcatgtcttgattacacttaaatttccttgagacccaacatttccgtcttatcctctctgtatccccagtgccttgtctgatgtgtggcacatggaagaccctcagtaagtcactattgaatgaatgagctagtcttagggctggaagggaccacagaagcagagtgaccaatatgacccagtttgcctgggttatcctcagttttaccactaaagtcccaggcaaagtgggaccattggtcatcctacagaaattcacctggcccaatttcctgtccagttctcctcctcctcctccttctcctccagctaatgctactattaatataaccattgactgggcacttcaatgtgccaggtgctgtactaggtgctttacacatactatctcatttaattttctcaatgatcccattttacagatgaagaaactaaggatcagagagattgagttcctctgggacatgtggctacttggtggcagacagggtatgaacacaggtctgcctgacccagatcatcctctaggacttctagtgactggtgctcctttcttggagaggcagcctattccatgtagaattgctgggaagaagccaaccaagtatttgtcctttcattccagtgagagctacttatagaagcaccctgaacctcttgccttgtttggctttcctttcacactctgaatttaccataattggctttgcagatggagctttggggcccccagtaagtggaggtagatggtggacttcttgccatggtcaacaccccttccctttgtggcagtggatttgcttccatccagatacaaccctgggaagggccctgatatggcagcttcagggcatcttgctttgagagctctgttcactgttatactttggaaatagacaagccccaagcagccttcagcaagtgtcatcatgctgaacccttacacattcccaagatgccaccaagatgcgtacataggaatcagatttctattatgaaagttctcatctttctgtaagttgaatgaagcagactgttgtcactcaccttaaattcccccatcagacaatctgcccgcagagagtgagaattataaacctggaagaaagaagagtagtgaagaaatgattggctttgcctggcagtgagtgagcagtaccttcctacttgctgacccttacccggatgctgatgatctcatccatcaattcagaaggggtcatgttgacattgtagaaaaacaactgccaaaacaatagagcagatgtttaaatgttaacaggggattcgggttaggggaatctgatactataattttgggggccctcctaaaaaatgcaaaacacaaattcaaaattaggtttgaccatgtgaacacatggcaaggcctggagtttaagccctgcagtttaagcttcatggtaaacccacttcttcatgttggaaaaaggagaaaagggtaagtaacaaatatagcatttacttaactaaagaaaattgttcacctggggctagatatctaaaagctaaataatgtaaagatccaaagctaagcaggtatcggggtacacccctgtaatcccaacactcagtaggctgagatgggaggagtgcttgagcccaggagttcaagaccagccaggacaatatagtgagaggccatctcaaaaaaaaaaaaaaaaaaaaagggaaaaagatccaaggtgacttcatgctgcaatgcttatcaaaatgagcgcttagagctggcatgacctggagtgtgttttaaatttctctaatatctttagctctattagtgtctagtgactctaattttactccaagaaagcacctttcaagacaattttgcccattagattaagttagtgcctcagcaaagtcaatattgaccacattgtaaaagctaattttaagaaggttgattcttgggatatgaatattaggtatataggaggtttaaccatgttaggctaataaatgttaatcctaaaagattgaacacttactccaactgagactttttcctccaactttttacttaggaatatttctaatctacaggacagctgaaagaatggtaaaataaataccacctttcacctatgttcaccaattgttccatttttggacatttgctttatctcttttttaaactgaactatttgcaagaaagctttagagatcatgacacttcaccccttcaaaatacatttacatgcatctcctaagagcaaggacatcctcctatagaattgcaacaccattatcataaccaagaaatttaacatctaacagagtcaattttcaaatttctccaatcatccctacaaaaaaactttagcttttcaaagaaatctaggatctatgcaagaatcatacgttgcatttcgtttttgagtctcttcagcttccaaaaggaagctatataaaaatatagaacagtgctatttccttttttgtttcttgtgttttttcttgccttttgttcttctttaaatagagatgaagtttcactatgttgctcgggctggtcttgaactacaggcctcaagtgatcctcctggcttggcctcccaaagtactgggattacaggcgtgagccaccatgcccgttgttttgtagaatatcccacagtctagatttgtgtgaatgtttcctcactgtcggatgcaaattggccatttgacaagacttgacacaggtgatgttgattacttccattatctcacatgaggacaccacatcatttttgttcctattattggtgataacaagtttaatattacttggttaaaaagatatatacaggctaggatttttttttttttttttttttgacggagtctctctctgttgcccaggctggagtgcagtggcacgatcttggctcactgtaacctccgcctccaggctttaagcaattctcctgcctcaacctcccgagtagctgggattacagccacccatcaccatgccaggctaattttttgttgtgagacagagtctcgctctgtcacccaggctggagtgcagtggcccaatcttggctcactgcaacctccgcctcccaggttcaagcaattctcctacctcagcctcctgagtagctgggactacaggtgtgtgccaccacacccggctaattgtttgtatttttagtagagacggggtttcaccatgttgtccaggctggtcttgaactcctgatctccaatgatctacccacctcggcctcccaaagtgccagtattacaggcgtgagccaccacgcctggccaggctagaaatttttttagtaaacctcttttttatatatatatatatatatatatatatatatatatatatatatatatatatatatatatatatatttgtttttatcatcttacttttgtttctcctatcccgtaaaatttttttatcgattaatgtactggacttctcttttgccaagaggtctaatccccctcaaactcattaaaatgggaaaattctgaggaaggtggagatgtttgctgggctcctgggaatgcagctgagtcaacaggaagcctgcattatcaatgcatagacagggtttacgcgttaggcccaagtaatccagcatcttgcctcctcccccccgcatccagtcttgccctccaacgtgaatctctctgccttccctgaagtccatttccagtgccccatctctgtgcagcccctacctctcatgagaatgtgtatactactgtacttggctgcctgctgtcatctgcgattcctttgaggggagaggttagaggttagaggtgagaagaaaataggaccttctgcagagctggaagccagtttgaacgaagaggaagaaatagaaacgcggcatagaagaaatcatttcttttctgaataaagaagtaggaaaaaaaaaaggacaaacgccagagctgggattagagccgtagggaatgaagaggtagtgtggtaagacaggcctgggctggagaacagagcaggagacataggcctgaggaatcccagaaatgtgtctcctcagcacagttggccaagactctgaaaagttccctaaatatatcgtttctccccacagcccagtcatggagttttgtggcatttgagatgattatcaaggtatcatgtatttttgaggagtgttataaaagagggcagtagaacaggctaagttctcagtatgggaggcagggcgcagtggctcatgcctgtaatcccagcactttgggaggccaaggtaggtggaacacctgaggccaggagtttgagaccagcctgggaaacatggcaaaaccccatctttactaaaaatacaaatattagctgagcgtggtggtgtgtgcctgtagtcccagctacttgcgaggctgaggtgagagaggattgccttagcctgggaggtggaggttgcaatgagctgagattgcaccaccacactccagccttggcaacagagactctgtctcaaaaaaaaaaaaaaaaaaaaaaaggccgggtgtggtggctcacgcctgtaatcccagcactatgggaggccgaggtgggtggatgacgaggtcaagagatcgagaccatcctggccaacatggtgaaaccccgtctctactaaaaatacaaaaaaaaaaaaaattagctgggcgtggtggcgggcgcctgtagtcccagctactcgggaggctgaggcaggagaatggcgtgaacccaagaggcagagcttgcagtaagccaacatcacgccactgcactccagcctgggcgacagagccagactctgtctcaaaaaaaaaaaaaaaaaaaatttatcagtacggggggcaaaacaaacaaagcccctgtgtgctaataactgctttcctttaacatatattatttttgcagccaagtacgttttgacacctctaaaaaactggattagtcacgagagttgtccctcagagacaccctgctaattagaataagcaaaggtagatttaggagacatcatgtcctctctcataagggtcgaagggatcatcaagaagttgtcacaaaaacaccagaaaggcaacagcatctctgagaaccactgacagaggggaccaggtaattttcctttttttaaaggcatctcactatattgcccaggctggtcttgaaaatctgggctcaagcactcctcccgtctcagcctcttgagtgttgggattacaggtgtgtacccccatacctgcttagccttggatcttcacatcatttagcttttagatatctaaaagctagatatcttttagattgtcccaagtgaacaattttatttaaataaatgctggccgggcgcggtggctcatgcctgtaatcccagcactttgttggcgggtggatcacttgagttcaggagttcgagaccagactgaccaacatagtgaaacctctactgaaaatataaaattagccaggtgtggtggtgcatgcctgtaatcccagcgacttgggaggctgaggcagaagaatcacttgaaccccggaggtggaggttgcagtgagccgagatcacgccactgcactccagcctgggcaacaagagcgaaattccatctcaaaaaaaaaaaaaagctatatttgttacttacctatttctccttttccaatagcagaagtgggtttaccatgaagcttaaactccagggctttttccaagaccctgccatgcgttcacatggtcacacctagttttgttcctgtgatctctacttggaactcagtggtgtcttcaccagtgaagctgctcccgtgtttccctccccagtgggactcatgagcagaaacatgccctctcaacccctttacctcatcaaaaaaagggttgtttcctctcttgattcttgttcggtgtgtctggccacagacgtgaactttgaccacaggccttatgttgttaccacttaactgtcggccctcaatcactcggacgcggatctgcagcacagaagggggatggttacccaacctttcccagcacgtgggatccttaggatcctcaggtgttgcttcatttccttcacctattaggattgctaacaccaggccagggcagctttgtgctataccaggtgctaccaattgggtggagccacctagggtcattcccaagatgggaactggggttgggttatagagaccaagagcagctgtagggatgaaatcattcaaagccggcctgggaaagggcagggcaggtggaggtcactgctcagactccagtcatgcacctggtcttgctgagcctagtgatgaactaactccatagctgccttccaaatctaagacagggcccagagctgcgaaaaacacagtatttgcgcttctattctttgattagctctttccttctgccaaagggaaggagaattatagttttatttctctggagaccatcagctggctagactaaacccacttgtgcctgcagaagaaagatggagagcttttcttactgggtttatacactgacatctctctttaccggttgagccattgtccattggaataggtccactgaaacatcactgcaattgccagaagatgggcaatataaagattaaacaaagaagcagaacgccaggccgttgctacctggaagtcctgtggcttatttgacagcatccgccggctgttctttactttggtgagcctccgagcaagctgagcttccgacaccgtcccaactggccccttgggcccagggcccctgactgcattgtccaacctgtcttca

SEQ ID NO: 602 - DNA, 13996 bp, Homo sapiens
gggagtattattttatatttgggtggacttgggtcaatgccactctaaaaaataaggtgctagctctctgtgttgacacaaaaatttcataaaaccgctattgggaaagaagttttggatgggagcaagaaagctgaaaatcttcaaactgtaaatttcatttttttctaaaagtttacaatatatgcatactagattatgattttagcagtttacttatatacttcaatgattaattgttttgcaggccatcaccaaaacatcattgaaatggttcactaggttcatcacatttggcttctaagaaaccaaacctactgtgaggtggctaccccagttcatttttttctcagactggagaaaagttctgtatccagtcttgttctagatctgttgagtgacttaccttccacttccccaccagaggcagcaattttagagaggtgtagatatgttgttccaactacatcatttttagtaagacggtccctgtgtaaaaaataaaaataaaaaaataaaaaataaaaggttcagagctccatctaggaagatatgtcttcatttcaacaattaaaaaaaagttagagctggaaaataccccagacttcagaaataatcacgtctagtgggcctcaaactttattgtacttagtaatcaactagagacttctcaccctcatctcctgcccacatttttaattcaataagcctagagtggggactaagaatttgcatttataagtgtatcccaattgattctgatacagatggtcctccagtcaccctttggaaacactggtctagtaaggtaatttattctgaagttatgaaattgcaattgtacagagaggccaagagatgtgcctatggctacactcaataccattgtcataaaatgaattaatcaattataggcacattacataattatgattgtgatgatcatgatgatggtaacgatatttgtcatgtttccactgtcagggagctaagggtgcctgctgaatgctacatccaactagaacattccaagaatggtcttgttatggccaatcagtgctagaaggctggtctactaaaaattctatcagaacatttcaaggacttttccttgccttcattgaggtagttttaccattttctttttaaacaataacaatgaattgctctcagaatgttttggtgattcttcccaagaaatgcttgactgtatttctgaagtctattctggacagcctaatgatatttaaatccctgatttcttatcttggggcattttcagcacgttccccttcttttgtttatgagcagttgaaccgaaataatcgaagctttttttgcagtaacactattattaaattttgttttaagaaacacccggttccaggagcaatttatcctctcctctggaaggaaagcaaaataccagaaagagacaatccagagtaatgtttcacaatatccaatgtttattttatgttgaattagacacatacgtattttcaactcaccagtcatatattgttagttttattttttcacacactgaaggaaactaaaaaaatgagacagaaaaaagtagttatttctcaatgatttagtaattattaagtaagtattcttactttttcagaaagaaaataaagtcaaaccttgatctgaagattgacgacctgattccactctgggtttgcatttttctcaattatgtttgtacaaacctgtaaaatcaccaaagcaaaagtgtaggttttcaagtttctaatttctaaaagtttacaatctatgcatactagattatgactttagcagtttacttatatacttaggaacctggttaaactttatttttcttgatgatttgtaaaatatgacatgggtttaatattaatcattgctgtttcgaggcactaggagcttgcttttaacctttttttaattagttttcaattgtcaggcttctaacattagattaatgtaaaaaagcaagagataaggttgatagagcatttgttacataccgtttgggaagcatctaccattaacacatccagacagatcttttgaccctgcccgccagcctccctgccctctaccccaaactgactcttgttccagtctttccatcgctcttcattcaggtggtcaggctcagaaccagaatcagccacaccctgacacttccgtcttcaagcagatcctggaatgtcttcaagccgatcctgaaatgtttctccccaggacacctgcggttgtctatctgaactccacaccctctcttgcctcctgactttcatgtcacttctgtgtaacatcttcagggggccctcaaagtacacttcaaataaagccccaatccttcactgggctgatgaagccctactgtcccaaccctacttctcactgacctcctagttttccccgcttgctggctctatcgcagccacatgggcaggccttccctgctaacattttcttccttggggcccttccatcgcccttctccctgcctggatgcctccctccccgatccctgcatatccaggcctctgctcaactgtcactttctccaggagtctcacctgataacctggataaacactcctcccctgcaccaatcacttcttgtccctgctttgttttctttgtagcactgggcaccatttaaaattattcagtttcttgtttgcttgtttattgtctgtctcttctattcccatgtgttcgtttctatatcccagcacatgggacagaatctggtacttaatgactttttgaatgaatcaaacctctcaacaatcctgtgattattattatctccctttatagttcaggaaatggaaactcagagggtaaacgatttgcctgcctatgaagtggggtaaagcctgaatttaattcaggcctcattttgccccagagctgaaggcttttctaccacacccactgaatcttttagaaaaaagcaccagtcatatgtgtatgtgtatgtggtttgccggatcttgctttcataattatatggttcgaacacataaaagatgctagttctttttgtctataactgtccatgatgtgctattattctactgtagaatctcacccaactctcaactctctaatctttgaccatctctgtaggtaaaagtggtggttatagctgtccctacaccaagagtctcccagatattttcaggggagtgggatggggcttccctgacccattctctggtttcaacagtttactggggcatggagggtgagaaacatgacaggaaggggcaacagggcactgggggggatctccgtcctacaacatttaccagggatgggtgtggctggccagagagcttgcctaaggttaagataacgtttggacctgaaaagcaattccagaaattcagtggtagccttccctattttaatctctcaaaagattgaattttctaatttgtgttctgcatactttccactccaaaataaacctgtggagaagtctggcgtgttcagactcagataatctgtgttcccgcagagtgcctggctcatcagggggctattttaacaaagagtaagcaggaattcactccaaggaaagcacagtagttttagatatttattactagcagcatctgcatttagatcatgtacaaaccttttttccagcaaaggaaacttctacaaaaggatccacgagatttttcttatctgcattgcctccaaatatttcctttactgtctgtgagaaggcatcatccactggaaggtaatagttatacagcagaaattaaattcaattcccagaaatttggcaaaattttaaaagttctcttatacatcaaaatagttgcaacaggctaggcgcagtggctcatgcctgtaatcccaggactttgagaggccaaggctggtggatcatgaggtcagaagagcaaggccatcctggtcaacatggtgaaaccccttctctattgaaaatacaaaaattagctgggtgtggtggcacgcgcctgtaatcccagctactcgggaggctgaggcaggagaactgcttgaacctgggaggcggagattgcagtgagccaagatcacaccactgcagtccagcctggtgacagagcaagactccatctcaaaacaaacaaacaaaaattagccaggtgtggtggcacatgcctgtaatcccggccacttgggaggctgaggcatgagaatcacttgaatcttgcagttagccaagaccaagccagtatatgccagcctccagcctaggtgacagagtgaggctctatctcaaaataaaataaaataaaacaaaaacttgatcttttatggaggaaaaaaaatacaacaaagttcattcagtgagagtaaaagatgattctcaaactcaggcctgctttcaattgggagaaaggtgctctaggtcaaaatgatatagtcctagtctgtttcagagaaattcaagaaaatttgacataatcacaaataatatatttaatcaactacaatctatagttaagctaaaaagtaaatagagatcaggattttaatttaccttattttatgtatttctttcttcttcttcttttttttttttttttttaaatagagacagtagtcttgctatgttgcccaggctggtcttgaacttttggcctcaagcagtgctcctaccttggccttccaaagtgctgggattataggcatgacccactgcctccagcccatttgacacatttttgagagaaaggtgggtatggggaggccctacaatactatcttttaagaccataggatcttaaaagaggaaaaggattcccaagaaaagcagcaaatcctgaagagatccatggcctgtatagtgagtgcagcctcctggggacttggagaagggtcccatgtcccagagcccagcaggaaccagacaggcccagcaaggcaaatgggaggctgggccatcagcagtgacagagggataaccacactagttcctataaatggaatcactagaagcgatcccttaaatgcaaccagtctcttgctgaatatatttcataatacaatagtggcagacttctagtcattgggacattactaccctttgctcagcatgtttttttttttttttttttgagatggagtctcactctgttgcccaggctggagtgcagtggtgtggctcacggcaacctccgcctcctgggttcaagtgattctcatgcctcagcctcccaggtagctgggattataggcacccgccaccatgcccagctaatttctgctattttttttttatagctggatagcaaacaccttgatttgataataacagttcacattttcatttgggataaaaggggttggaagtgctgactgctcatatctctttagcatcctctagaataaagagaagatatagaatagcaagagagagagtcaaatgggccaaaggcaggtactcaacaaggaacatgatcagcaaccaactagctgtgccatgagcctgctcaggtagctttcaactgggccagaatgaatgaaaataagcccatgaagccctttcagaagaaaaacatacgatagggacacgaatcactattaaagtttgatttttaacacatttcatcacacacataatcaacaattctggggcaagattaaatcagtacatactctgggggatgtcctcagctcggtagattttcagcaagaaggtcacccaccggagggcaatgccagcagggagtaacaaattactctccacatcatcactgtcattatcacgatctcgtctctcaggctattaggggcacatgatttaaattatacatacagaaaagcagcacttggaaaaagccaaattaatgcttataaaatgaaaccattcagaatcgtttccattaagatttcctgtgtttggggcttaagagttcagcctgccatcagccaccagttttccttcaacctcaaaactgctccacaaaatcaatgctcatgtttttgtatcattctgtcattttatgagcaccaaatagtaagagcctgtgcgtgtgtgtgtgtgtgtgtgtgtgtgtgtgttcctgatgtcccttcaacttctctctggccacttatattctgcagtttgccacccagtttcctagaataatcactaactatttaggtagcaatgcctaattctgcaagtaggtcatgctttctagataaaagcagtctttctaatgaggcaaggacgttgtaaaaacacattcatcgattctcaattaaatgctcactcatagacatcagataagagtttaagtaagctagaacaataattccatgatgaagaaaagaacagcttctgaagaatagggggaatctgagggtattgacgggaagctgtgctccatttcacaattacccatgcccacatgcttaactcttggccttcttttttagtgagaagtgtagaaagtagagaatgtagggactcacaggaggctcatctccggttcccaggacaaacatgctgactttcatataacctttagaacctgaactggtatcttccgggtcattgagaagaagccactttctcatgacagcatggcctaaaatagagaaggagtaaaaggaaatggacatgctaaaaaggtactgataagtctgtgattcctctgccataagataagctgcattttcttggaagcctcttcacgacacaccaaattccccagatgagtgtccactttcaggtcttctgttttgtactctccctacaccccacccccaccattctgtcctcgtgtaactcaaacaagactctctaagttgtaccaacgagttttataatttaattttgataagatcaaaatatcctcacaaaacatagaaatcatctattttgaatgttaagataaaaaattagacattttttctaagctactgttatttattcccactaagtatcctctcctctccctcattaagaaaatatttttttaaaaattcctttaactttaattctttgatccccccaaattgtcttgattcttagaatcatcttcagagttagaaggaatgaatttaagacttcatattgatggggagaacattacttaccaggttcatcataaacaaatccaacatcaatctgggaaaacaataatcgaaagtagtctaagtagattttaaaatcagtctagtcactttaaagaagccatcattatatttaaatatcatgtcttgattacacttaaatttccttgagacccaacatttccgtcttatcctctctgtatccccagtgccttgtctgatgtgtggcacatggaagaccctcagtaagtcactattgaatgaatgagctagtcttagggctggaagggaccacagaagcagagtgaccaatatgacccagtttgcctgggttatcctcagttttaccactaaagtcccaggcaaagtgggaccattggtcatcctacagaaattcacctggcccaatttcctgtccagttctcctcctcctcctccttctcctccagctaatgctactattaatataaccattgactgggcacttcaatgtgccaggtgctgtactaggtgctttacacatactatctcatttaattttctcaatgatcccattttacagatgaagaaactaaggatcagagagattgagttcctctgggacatgtggctacttggtggcagacagggtatgaacacaggtctgcctgacccagatcatcctctaggacttctagtgactggtgctcctttcttggagaggcagcctattccatgtagaattgctgggaagaagccaaccaagtatttgtcctttcattccagtgagagctacttatagaagcaccctgaacctcttgccttgtttggctttcctttcacactctgaatttaccataattggctttgcagatggagctttggggcccccagtaagtggaggtagatggtggacttcttgccatggtcaacaccccttccctttgtggcagtggatttgcttccatccagatacaaccctgggaagggccctgatatggcagcttcagggcatcttgctttgagagctctgttcactgttatactttggaaatagacaagccccaagcagccttcagcaagtgtcatcatgctgaacccttacacattcccaagatgccaccaagatgcgtacataggaatcagatttctattatgaaagttctcatctttctgtaagttgaatgaagcagactgttgtcactcaccttaaattcccccatcagacaatctgcccgcagagagtgagaattataaacctggaagaaagaagagtagtgaagaaatgattggctttgcctggcagtgagtgagcagtaccttcctacttgctgacccttacccggatgctgatgatctcatccatcaattcagaaggggtcatgttgacattgtagaaaaacaactgccaaaacaatagagcagatgtttaaatgttaacaggggattcgggttaggggaatctgatgctataattttgggggccctcctaaaaaatgcaaaacacaaattcaaaattaggtttgaccatgtgaacacatggcaaggcctggagtttaagccctgcagtttaagcttcatggtaaacccacttcttcatgttggaaaaaggagaaaagggtaagtaacaaatacagcatttacttaactaaagaaaattgttcacctggggctagatatctaaaagctaaataatgtaaagatccaaagctaagcaggtatcggggtacacccctgtaatcccaacactcagtaggctgagatgggaggagtgcttgagcccaggagttcaagaccagccaggacaatatagtgagaggccatctcaaaaaaaaaaaaaaaaaaaaagggaaaaagatccaaggtgacttcatgctgcaatgcttatcaaaatgagcgcttagagctggcatgacctggagtgtgttttaaatttctctaatatctttagctctattagtgtctagtgactctaattttactccaagaaagcacctttcaagacaattttgcccattagattaagttagtgcctcagcaaagtcaatattgaccacattgtaaaagctaattttaagaaggttgattcttgggatatgaatattaggtatataggaggtttaaccatgttaggctaataaatgttaatcctaaaagattgaacacttactccaactgagactttttcctccaactttttacttaggaatatttctaatctacaggacagctgaaagaatggtaaaataaataccacctttcacctatgttcaccaattgttccatttttggacatttgctttatctcttttttaaactgaactatttgcaagaaagctttagagatcatgacacttcaccccttcaaaatacatttacatgcatctcctaagagcaaggacatcctcctatagaattgcaacaccattatcataaccaagaaatttaacatctaacagagtcaattttcaaatttctccaatcatccctacaaaaaaactttagcttttcaaagaaatctaggatctatgcaagaatcatacgttgcatttcgtttttgagtctcttcagcttccaaaaggaagctatataaaaatatagaacagtgctatttccttttttgtttcttgtgttttttcttgccttttgttcttctttaaatagagatgaagtttcactatgttgctcgggctggtcttgaactacaggcctcaagtgatcctcctggcttggcctcccaaagtactgggattacaggcgtgagccaccatgcccgttgttttgtagaatatcccacagtctagatttgtgtgaatgtttcctcactgtcggatgcaaattggccatttgacaagacttgacacaggtgatgttgattacttccattatctcacatgaggatactacatcatttttgttcctattattggtgataacaagtttaatattacttggttaaaacgatatatacaggctaggatttttttttttttttttttttgacggtgtctctctctgttgcccaggctggagtgcagtggcacgatcttggctcactgtaacgtccgccttgaggctttaagcaattctcctgcctcaaccttcggagtggctgggattacagccacccatcaccatgccaggctaattttttgttgtgagacagagtctcgctctgtcacccaggctggagtgcagtggcccaatcttggctcactgcaacctccgcctcccaggttcaagcaattctcctacctcagcctcctgagtagctgggactacaggtgtgtgccaccacacccggctaattgtttgtatttttagtagagacggggtttcaccatgttgtccaggctggtcttgaactcctgatctccaatgatctacccacctcggcctcccaaagtgccagtattacaggcgtgagccaccacgcctggccaggctagaaatttttttagtaaacctcttttttatatatatatatatatatatatatatatatatatatatatatatatatatatatatatatatatttgtttttatcatcttacttttgtttctcctatcccgtaaaatttttttatcgattaatgtactggacttctcttttgccaagaggtctaatccccctcaaactcattaaaatgggaaaattctgaggaaggtggagatgtttgctgggctcctgggaatgcagctgagtcaacaggaagcctgcattatcaatgcatagacagggtttacgcgttaggcccaagtaatccagcatcttgcctcctcccccccgcatccagtcttgccctccaacgtgaatctctctgccttccctgaagtccatttccagtgccccatctctgtgcagcccctacctctcatgagaatgtgtatactactgtacttggctgcctgctgtcatctgcgattcctttgaggggagaggttagaggttagaggtgagaagaaaataggaccttctgcagagctggaagccagtttgaacgaagaggaagaaatagaaacgcggcatagaagaaatcatttcttttctgaataaagaagtaggaaaaaaaaaaggacaaacgccagagctgggattagagccgtagggaatgaagaggtagtgtggtaagacaggcctgggctggagaacagagcaggagacataggcctgaggaatcccagaaatgtgtctcctcagcacagttggccaagactctgaaaagttccctaaatatatcgtttctccccacagcccagtcatggagttttgtggcatttgagatgattatcaaggtatcatgtatttttgaggagtgttataaaagagggcagtagaacaggctaagttctcagtatgggaggcagggcgcagtggctcatgcctgtaatcccagcactttgggaggccaaggtaggtggaacacctgaggccaggagtttgagaccagcctgggaaacatggcaaaaccccatctttactaaaaatacaaatattagctgagcgtggtggtgtgtgcctgtagtcccagctacttgcgaggctgaggtgagagaggattgccttagcctgggaggtggaggttgcaatgagctgagattgcaccaccacactccagccttggcaacagagactctgtctcaaaaaaaaaaaaaaaaaaaaaaaggccgggtgtggtggctcacgcctgtaatcccagcactatgggaggccgaggtgggtggatgacgaggtcaagagatcgagaccatcctggccaacatggtgaaaccccgtctctactaaaaatacaaaaaaaaaaaaaattagctgggcgtggtggcgggcgcctgtagtcccagctactcgggaggctgaggcaggagaatggcgtgaacccaagaggcagagcttgcagtaagccaacatcacgccactgcactccagcctgggcgacagagccagactctgtctcaaaaaaaaaaaaaaaaaaaatttatcagtacggggggcaaaacaaacaaagcccctgtgtgctaataactgctttcctttaacatatattatttttgcagccaagtacgttttgacacctctaaaaaactggattagtcacgagagttgtccctcagagacaccctgctaattagaataagcaaaggtagatttaggagacatcatgtcctctctcataagggtcgaagggatcatcaagaagttgtcacaaaaacaccagaaaggcaacagcatctctgagaaccactgacagaggggaccaggtaattttcctttttttaaaggcatctcactatattgcccaggctggtcttgaaaatctgggctcaagcactcctcccgtctcagcctcttgagtgttgggattacaggtgtgtacccccatacctgcttagccttggatcttcacatcatttagcttttagatatctaaaagctagatatcttttagattgtcccaagtgaacaattttatttaaataaatgctggccgggcgcggtggctcatgcctgtaatcccagcactttgttggcgggtggatcacttgagttcaggagttcgagaccagactgaccaacatagtgaaacctctactgaaaatataaaattagccaggtgtggtggtgcatgcctgtaatcccagcgacttgggaggctgaggcagaagaatcacttgaaccccggaggtggaggttgcagtgagccgagatcacgccactgcactccagcctgggcaacaagagcgaaattccatctcaaaaaaaaaaaaaagctatatttgttacttacctatttctccttttccaatagcagaagtgggtttaccatgaagcttaaactccagggctttttccaagaccctgccatgcgttcacatggtcacacctagttttgttcctgtgatctctacttggaactcagtggtgtcttcaccagtgaagctgctcccgtgtttccctccccagtgggactcatgagcagaaacatgccctctcaacccctttacctcatcaaaaaaagggttgtttcctctcttgattcttgttcggtgtgtctggccacagacgtgaactttgaccacaggccttatgttgttaccacttaactgtcggccctcaatcactcggacgcggatctgcagcacagaagggggatggttacccaacctttcccagcacgtgggatccttaggatcctcaggtgttgcttcatttccttcacctattaggattgctaacaccaggccagggcagctttgtgctataccaggtgctaccaattgggtggagccacctagggtcattcccaagatgggaactggggttgggttatagagaccaagagcagctgtagggatgaaatcattcaaagccggcctgggaaagggcagggcaggtggaggtcactgctcagactccagtcatgcacctggtcttgctgagcctagtgatgaactaactccatagctgccttccaaatctaagacagggcccagagctgcgaaaaacacagtatttgcgcttctattctttgattagctctttccttctgccaaagggaaggagaattatagttttatttctctggagaccatcagctggctagactaaacccacttgtgcctgcagaagaaagatggagagcttttcttactgggtttatacactgacatctctctttaccggttgagccattgtccattggaataggtccactgaaacatcactgcaattgccagaagatgggcaatataaagattaaacaaagaagcagaacgccaggccgttgctacctggaagtcctgtggcttatttgacagcatccgccggctgttctttactttggtgagcctccgagcaagctgagcttccgacaccgtcccaactggccccttgggcccagggcccctgactgcattgtccaacctgtcttca

SEQ ID NO: 603 - DNA, 552 bp, Homo sapiens
tcttccccatctcctaaaatatcagaaagaaacccagtgagggatagcccttatcctgtaaatgtccaaaggctcaggtttccaggacacggttttgtctgccattatgttttaagtgttcctaaagtggcaggtgaaggagatcctcttggtgacactgacttgggacttcttgtgacttggaaaaattctttaggaaaatgtgttcacagtacatcggggctgttgctcaggttgccttcgaagagaccaagagaatggcagagatcacagggacaatgagaggagatggcaccgttggacccagccagggattgctgagttctcattagtgttaggatggaaaaaggaagaaacatcacggaacactgcagtcttgcaatgacaagcttcaactccatccctcccactgcagatcttctctctagagatctgctcgtgatctatttgtactgtttcctgcttgagcctcctaattcacaactgctctttccaccctaatggcagaagagaaactctcctcattttcttgccaagcaccaaggtgatcat

SEQ ID NO: 604 - DNA, 303 bp, Homo sapiens
tttgtctcctttttttttttttgagacggagtcttgctctgtcgcccaggctggagtgcagtggcgcgatctcggctcactgcaagctccgcctcccgggttcacgccattctcctgcctcagcctcctgagtagctgggactacaggtgcccaccaccacgcccggctaattttttgtatttttagtagagacggggtttcaccatgttggccaggctggtctcgaactcctgacctcgtgatccacccacctcggcctcccaaagtgctgggattacaggcgtgagccactgggcccggcc

SEQ ID NO: 605 - DNA, 552 bp, Homo sapiens; identical to SEQ ID NO: 603

SEQ ID NO: 606 - DNA, 4963 bp, Homo sapiens
ttgaagccaaattggagagagatgtatttataccagtggggctaaggaggaagcagtccagtgggggactttgagtgctgtgcagtgttctcttaagagtcgtagtacagtcctggggtcaagtctctttccctaatctttgctggggaagccttgagccttgatttatccttcccttggctttgggctttgaggaagttggggatggaggggatgatgcttctttaggtttctctattccaagcccctctgaatttctagttgcaacctgccttcacacagagttgatgggaaagattagttgtagatgtcggtatgggattgagcctacagcaagaggaagaagggaactccagtatagagtacacaaaggaaaagggcaggaaagataccaaaggcttatgaaaacaaaggaagggaagaaaagagaaaaaaggtggaaaatcaggtcccagattgcttgttaggaagaatgaggtaattttgtgcctaggaatgcacaatccaaagcttgattttcaccacctccatttgttctctcgagcatccttccagatgtttctccccgtctaaagccagcacaccaacccttcccgtgaaatgcccacctcaggactcatccccctccaggccttcctggatgcagatatacacaaagatggaagctgggcggaggctgatgccatctttggacagcaggtgaatgtggcggtaacctggaaggggcaggaggacagcattaggaaggcagccagagctggggtattggccaggggccaaaggggctggctcaccttgttgcatgcaggtccaaggcagggtgtactgaccaataaagtcatttcgggatttccagtcataatccattaccacaaaacgcagcatggcaagttcaggcaccagcacccggaaacatagtgtctgcccccagtatggattaaaacctgagttggtggacagaaagaaataagaagacattatgacagttttcttgactgggttgcttttcttgtgttctcatttaatctagatggcaatcagcattttacaggtaaggaaaaaggctcagagtaagcaagtaatttgcccaggtcactggagcttttaagtgaagagccaggattctttgtactgttccacactgcctcccatgtggggacatgcaataacagatgctatacttaatggaagacagactagaaggaaaactaatcatgctcctacccccacctccccagcactgccagtttctcaccattgttctccacatagttggtctcctgccgtgctgtgtctagacgaacgccaaagatctgcactttcaccagtggatccacaatggacccctctttggtcttgtccactttggggagttgctgaacgctgatcacctgtagtcagggctctggaatctcacaagttcctggtcagcccagcccaccccgacctactcccaaccccaagggagaagaagcttttgggtttttaaaacatcctccatgggtaatatatttccttctagtatcctatctgcaattaaaaaggcacccaaaggccggccccgggggctaacacctgtaatcccaacacttcaggaggccgaggtgggcagatcacttgaaaccaggagaccagcctggccaacatggtgaaaccctatctctactaaaaatacaaaaattagccaggcatggtggcgggcgcctgtagtcccagctactcggaaggctcagatgggagaatcacttgaacccaggaggcggaggttgcagtgagccaagatcatgccactgcactccagcctgcagcagagcaagactctgtctcagaataaacaaataaattaaatggatccaggtagaaattcaacagtttgaaagtaggcatgctaatgacagcagccactttttttttttcaaagagacacgatcatactcttgaccaagctggaatgcagtggggcagtcatagctcactgcaacctccatctcctgggctaaagtgaccctccagccttagcctcctgagtagccaggactatctatagtcatgtgccaccatgccaggctaatttttaaattttttgtagagacgggagtctctacaaaatttttaaattttttgttgagaccagtttcagactggtctcaaactcctgggctcaagcagtcctcctgccttggcctccaaagcgctgggattacaggtgtaagctatcgctcccagccagcctcttttatagcacttcctgtgtgccaggaattgtaagaactttatattaactgttatactccttataaccctgtgaggcaggtggtagtgttacccctattttgcaggtgagcagactgaggtatggagaggttaaggaacttgcccaacattacccaattaggaagttgtggtttgaagctaggcagctggctccaaaagctaaaactagacactgttaataggctatccggcctctacattccggtcaggcctaggacactcggcgctcgcttcgagcacagttaggtcagttgcttcccgagagggcacttgggcgtgacctggtttaagagagtctgggctttgaaagggctgatgggcttctcagggtggaaagaactctggatatcacgcaggaagtctggcttcagcacatagccacagccgccattctggcggaaatgcccatcacagatgtccatttcaagccctgcagtctgcatattcatggccactgagggccccaggagaaaagaagagcaagattcaccatggaggccttccagcccctctttcagggagttaagaagataggtactgggtgcacggtacctgctggtaatatccactgatagcatttctcagcctagcaattttcttgagcattccccaaccctaccatcactagagaacttatttcccacctgctgctcctccactccctcttcccagtccctgctgcctcctcacccatctggcagcctgcattccagagttcctgggggttgtagtagttggaagagtctgtcctcaggccgctgggatacacacggcttaactgccaagtattgtgctgcacaaactcattgcctgtaaaagggtatagagagggagatggaagtggggtggaatctcccacttccctagtcccaaggaccatgcctactcttcacccttctctccagcatctgaagctggctccagaaagtttcactgtgcctctctactctgtccatccagaccagctttcctgcccctagacccttgagccactattcataactcctctgcccttgtctgctctaaggagtttctgaactccttcatctctccttagctaccttgtcttttttcttgggacttacctgccagtccatcaggcctgaacctatccatcccacttccctccccatccctccattttggtcctgaccagcctccttgatgaggcgcttggccttggtttcagagaaagatgatatctcgtagaagtggtagtgctcctttgaatgtgtgaagctgcggaatgagacagacttcaagtagataaccagggaagagagggctggacacaagatgggcttggatttctggagaaggtggaaaagaagatggaattgaaccctcagcagtctgagagagaagaagataatggccatccaacctaaacctctgcccactgcctccccactgtattctccctcctgcctcacctgccgggacaagagaagggactcaggcttggaaataggagcctgggccacaatctgacaacagatagacggacaaaacagcgggcacgtcacaacctgggggtgggaatgggaataaaggcggtctgcatgtactgctgggatcagtgtcaacctctgggcttgtgtttgctctatgttatatcctgggtgacaggttttaaatttattattatatttaaacagagaggcattatcctccctccctctcatttaaaacaaaggaacaataacctttggtcaaaatgtacatgaatccagacagatatgtcaaggtatgcaaatggtcatgtaagtcacacctggaaggatgtgagagtcccagagtaatatctttggatttgtctcctgaattcccatttccatccctggacatggcagcaggttagacaccacagccccagaaagcacaggataagctaggagtcagtcagctgagtgagccacgcaagtacacaagagaaaggcagacttcaaaccaggatcttggaggccccaccaatggcatcccttctccctctgcctcccttccccatagggagatggaccactctagcacagccttctcagagccttcacgttccccacctcaaaatgctctccttcctgctcctctggctactgctggcccttcctaaaactcatcctttccaaaaagctttctctatgcccactttggttgagatcacaacaatcattccagtaacccctacttacccaatataataatgttacacatacaaacacacacccgctcatcactggttttcaagctggcctttaagaagaccaagaagtacaaaaatgtctcaggagtcactagggcacccaggagagagccaaatgggtgcttcaactaggatggttctgcgtttatctattttgcgtaagatttcattttaaaaaaaaagatgtggcccaaagaagttggaaagccactgcaacatacctacatatggcagtatataatatatattgatgccatgtatgcggtcttaaatctccttcattgggaggaagggtcattgctccttggccctgcatcttgcacggctctagtcttcatgaacaggccttcagcttgcataagttgactaaataccacagcagaaagaccactcctggcttaccttctttttgtccttattctgaaggttctgctcctggggctcaggctcagtctcaaactgggactccagcgccaattctgactcttc

SEQ ID NO: 607 - DNA, 5216 bp, Homo sapiens
aggacacacccgtaaacagcacccacggcttgagtgtggggcctgccaggaggccttccctagccgactggctctggatgagcaccggaggcagcagcatttcagccaccgctgtcagctctgtgactttgctgcccgggagcgggtgggcctggtaaagcactacctggaacagcatgaggagacttcagcagccgtggcagcctcagatggggatggggatgctggccagcccccgctacactgccccttttgtgacttcacatgccgccatcagctggtactagatcaccatgtgaaagggcatgggggcactcgtctctacaagtgcaccgattgtgcttacagcaccaagaaccgacagaagatcacctggcacagccgcatccacactggggaaaagccttaccactgtcacctctgcccctatgcctgtgctgatccctctcgtctcaaggtaatgtcagaggatatggggcaggaagtggaaggagcacaggctctggagttaaactgccttggttctctatagctgactcctccagatattagctctgtgactttgggaaagttcctttaccaagcctcagattcttcatctgttaaaaatgagataataccaacttcatagggttgttgtaaagataaagttccataatgtggctcacgcctgtaatcttaacactttgagataccaagttaggaggattgcttgaagccaagagttgaagaccactcggcagcagagcgagatcccattacaaaaactttttcttaatcagctgggcatggtggcaagtacctgtagtcccagctactcaggaggctgaggtgggaggattgcttgagcctaggaatttgaggctgcagtgagctatgatcatgccactgcaccccagcctgagtgacagagcaagactccatttaaaaaaaaaaattgaggctgggtgcggtggctcacgcctgtaatcccagcactttgggaggccaaggtgggcggatcatgaggtcaggagatcgagaccatcctggctaacactgtgaaaccccgtctctactaaaaatacaaaaaattagccgggtgtggtggcgggcacctgtagtcccagctactcgaggctgaggcaggtgaatggcgtgaacctgggaggcagaacttgcagtgagccgagatcgcgccactgcactccagcctgggcgacacagcgagactccatctcaaaaaaaaaaaaaaaaaaaaattatcggccaggtgaggtggctcacgcctgtaatcctagcactttgggaggccaaggccagaggattgcttgatcccaggagtttgagaccagccagggcaacatatggagactctgtctttacaaaaataaatttttttaattagctggacattgtggcgcatgcctgtattcccagctacttgggaggctgaggtgggaggatcgctttagcccaggaggttaaggctgcagagagctgtgatcacaccagttcactccagcctgggcaacagagtgagaccctgtctctttaaaaaaaaaaaaaaaaaaatccctagcaagtaaactgaagattaagaaaaacaaagttccataatgtctgcttgccatatgataaaggcatagaacagggcaagaataacctggataataacagctaacatttattgagcacttactatattttctgctttttgctcttgcctcttccagtaccacatgcggatccacaaggaggaacggaagtacctgtgccctgagtgtggctacaagtgcaagtgggtcaaccagctgaaataccacatgaccaagcatacaggtgagtctgtgtggtttcgacaggcctgaagggttcctttgttccctggcaaacctaaccttaccaaggttggtccttgttccaattcagggccaacatcaatttcacattgggagtagacagcagggtggggttgtatgtgccagaatggctccccaacccactgaagacctgtcagaatcagaagggtaaacctgagagcctgggcatatgtactttccaaaagcttcccaggtgactgtgttacgaagtcagtcatttttcccctcttgagaacccccaactcaaacttgtatgactaagggcagatttgcttggctcttacacagacatgatggaactatcatgagttaaaaaggagaaagtgaaggattctcctgttctagtctgtccttttcttctcctgggtgtggatggaatccacaaacccggttcttgaaagcacacaatcgtgtgcctgtgcttattgcatctgatccccctatgtggaggaattgattaggagcatttcaaggccctctgcttttatgaatgccacttatttcacctctacctcttccctcctaagtatttcttttttttttttttttttttttttttttgagacagagtctcgctctgttgcccagcctggagtgcagtggcgcaatctaagctcactgcaagttctgcctctgccttccgggttcacaccattctcctgccttagcctcccgagtagctgggactacaggcacccgccaccacgcccggctaagtttttgtatttttagtagagatgggggtttcaccgtgttagccagaatggtctcaatctcctgacctcatgatccgcccgcctcggcctcccaaagtgctgggattacaggcatgagccaccatgctcggcccctcctaagtatttcttttactttttttttttttttttttcagtgacagggtcttgctctgctgcccatgctggagtgcagtggtgcagtcatagctcactacaatctcaaactcctgggtgcacatcatcttcttgccttagcctcccaattagctgggtctacaagtgcacgccaccacgcccacctaatttttttgtagacagggtctcactttgttgcccaggctgggtctttgactttttgagttgaacaagccgttgtgtttaaatgaattgtcgaattccatgagtactctgtgaccaaaagagggttataatttcccatggggaaacccttccatatttgagtattcattactgtcaggtagctagttggttagaggtcccgttaatcatcagcatccattgggcacccacaacattgattgctgggactacaacattgagttcttgttgatgtacaaggacgctgtgttggaaaggcacagaaatgtcagacagggccaggcgcggtggctcatgcctgtaatcccagcactttgggaggccaaggagggcacatcactggaggtccagagttcaagaccagcctggccaacatggtgaaaccctgtcttcactaaaaatacaaaattagccaggtgtggtggcccatgcctgttattccagctacttgggaaactgaggcaggaggatcacttgaacctgggaggcggaggttgtagtgagccgagattgcaccattgcactccagcctgggcaacaagagcgaaactccgtctcaaagaaaaataaaagaaaaaagaaatgtcagacaggactggaggactggagcattccaaagagatggtcattagtcaacttgctgcttgcattctttatatccactgattgcagtaactccatggcccagtaaaccttgctccaccgcctttcaatggtgatttgttccctgtcctgtaggactgaagccataccagtgtcccgagtgtgagtactgcaccaaccgggctgatgcactgcgtgtgcaccaggagacccggcatcgagaagcacgggctttcatgtgtgagcagtgtggcaaggccttcaagacgcgcttcctgctgcgcacccaccttcgcaagcacagtgaggccaaaccctatgtgtgcaatgtgtgccaccgtgctttccgctgggctgctggcctgcgccatcatgccctcacccacaccgaccgccaccccttcttttgccgcctctgcaactacaaggccaagcaaaagttccaggtggtcaagcacgtacgcaggcaccaccctgaccaagccgacccaaaccagggtgtgggcaaagaccccaccacccccacagtgcacctgcatgatgtgcagctggaggatcccagccctcctgctcctgccgctccccacactggacctgagggctgaaagcctgccccacctcctgtataggaagagggtatggtctgagatgtgcagactgggaccagcgctagcctgaggagctcagagcctaaggaaagactggcttttggggtacaagggtgactagaaccttcctgggactctggctatagtactttgaaattatcacccatataaaagagggacatggactataacgttgatttcttattgctgtacattgcgtttttaacctgcaagttctcagtttcttcaccatcactccatcaaagtccctggctataagatctggattttacccactccatcttctctttccttcttactgtgtcaattcctattttctttcagaatcttctaaaaacagttgtatctaaccgcatgtgctgttgtgcctaatgctctataaagcatgttaaacagaaagtggttactacattatagattcatccaaatccctgtcttaacatttccaggctgtcatcttgatcaactctgtcccctctcagacctctgcctcccttttgtcccttccatcttcactcagtattgatactgaaacaggcctaggtctgccttctccctgtccttgagccatcttgacccttgacctgctccctacttccaagctcctttgtctacctgtatctatagagggaggattgctacccactaagcctcctcctagaagcaactttagctcatcatcaatcctcagactggctcagcagctacactaaggtgttaaagcacaaggatactatggaaaggcagatgactagagaggaaaatctccaattcagaattctataactgcttcacagtataattctgtagtgccttactatataattgatcatctaaactgagacacactgggaaaacttaaagagggtactattaataattatgctgggacaacagacataaaccaggatggttccagccagactcttcaggaaggctgggaccacataaccttttgtctgcttttgccctgattcttaaaagccatactctgtgtccttcctatgtagcacatgcaagaggtctcctgggaacctctttctcta

SEQ ID NO: 608 - DNA, 105 bp, Homo sapiens
aggctgaggcaggagaatcgcttgaacccgggaggcagaggttgtagtgagctgagatcgcaccattgcactccagcctgggcgacaagagcgaaactctgtctc

SEQ ID NO: 609 - DNA, 1314 bp, Homo sapiens
aaactgacggtgctgtagaacaggatgtgcgagaatgctgtttggcaaacaaagagcgctctctggcccccagaggttctggcttttgagcccagactaaagaaagccaggctggagaccgtatatcaaactttgcaagcccgtttatataccttgctggtgcctcagggggcagaaatgctggttggggatctttgtgttttgttttgaaagagtgatgtttggaagcagaagcactcaaaaatatatcctgacctctggcacttagaacctccaccagagcttggcacttaactgttctgtttctcgtgatatgttctaattatctgtttccagccagattgtaaggtcaacaatggtagtttatttacgagtaagtcttagttttctcatctgtaggaatggggataaaaatgcaggtttgctatgagtgttaggggttcagggtttagttttgggcctaactgctcctgtctacctgtctacccttccagggcctctcaggacacaccttactcccaaagcacaatatccaaatggcaaagaggttgtccctttcttaatgagctccacaagcacctgaccaccaccccctcccattcgaggcctccctgtcccctcccgctgaacctaaaccgctctgaggagcagctctccagccatcagtcctgcttggatgaggatgctgattttgtgtctagggaaacaagtctgccccgtttgccttccacatggaggctgagggtacaagagaaagttgggggaaatagcaagcaaagttcagagggcagtggtccattttttcttatcagccacaaaacaaaaaataaataaaagaaggaggaggccgtgtctttgaggcacagtaagcctgcccactgaatgtccctgagagtaactagttataatagctactccttctacagggagacctagagacggggcagagagaggaaaggacgtgcccccgtgaatagcagaggggtgaacagtaggcctgggggagaaattgccttcctgacaagaagagttggagatgatgaatacaaaacccctgggacactgcctggcccatagtgatgttaccatcagtagtggctttgccgtttccagattgacatccatgccctaaacagagaactttgctgagatgaaatttccttgttggtatacttttgtgaaccactccattgagaaccagcacaaagccattgccttcttgaacgtcttcattaaaactagaataatctctgcccctcatttgcccatgcacatggaaaacccacggatatgccttccctgatggaaaatatg

SEQ ID NO: 610 - DNA, 114 bp, Homo sapiens
ttatttttgagacggagtcttggtctgtcacccaggcgggagtgcagtggcttgatcttggctcactgcaacctccgcctcccaggttcaagcgattctcctgcctcagcctcc

SEQ ID NO: 611 - DNA, 32195 bp, Homo sapiens
ggaccccggtgtctggcttcccccgagccgggaccccgcgatggccaagcgcagctcgctgtacatccgcatcgtggaggggaagaaccttcccgccaaggacatgtgagcgcggccgggggtgggagccccaactttccggggaggggcactgccccccaggacgcctgacctttccggggtccacccacaagagcagcggagagggtgcgggagtgcggccgtggtgggggatcggcggggaaaatggggacagtgacattttctgcgagcaccagacggggtgacaaccggggggcggggaagtgtcaccgagggctgggggctgggaactagggagggggcgagaatttgtcagcgatccgcggctcacgaggggaaggggctttgatacgacaggagctggagcctggtgacatgccaggggagacgtcttggtgatctgcccccggggtggggttggagggggtggggtgtcccccgcaaaggaagggtcttcctcagtagttccagagcccttaatgccccggagtgtgcacctgaagcacatgctggggcccaggggctgtccccgggcttcctgctgtgcactcgggtaggagggactggcatgaaaagtgagaacaggtcaggaggccaggacaggtgcaggactgtgggggagggaaggagggtagtaactgtcgcttgtgccttgggctttacacctgagccatcccgttaatcctctcaaccaccccgaaaggcagttctcaccgttccattttacagatgagaaaactgaggttcagagaagtgaaatgctggctccaagtggcaggcagagcagggtcttgagtctagggcttctcacaggcactgacatctggggattcccctggtccctggctcgatttggggaggtttcaggggccccttgttccactcttctcagtaggtcccagggctgagctgcctgacccctggcccaccatcttggtcttgccaccaccttcctcatgtacagggtttaggcagctccctgctcctagagcctcagtttcccctctttaaactaggggttgaaatccctctagaggaagagggggaaagctcaaaggtcaaggggcactggctgcctggaggaggagggtgggagggggaaaagtggagcctggaggaaacagagtccaaagtctgcggagctgcagttccccaccccttgggcgccccgggctcctggatgcagagaagtggctagcatgggcgagggggtggagcagggtggggggcaggcactctgctcacacatatgtgtggtggcccctgtgagcttcccagcaagctcagcgcgccaccaccgagagcagtgccagttccaggccccctgggtctgatgaggcccagctcagcagttaccatgacaatggggaagggagggcggtgggcatccctaggtgggtttctgtgcttggaggcttggagggaggtggagtgggagctggcagtgaggtctgtgggctgggaaggcagaggagctctgagaagggtctcagcctccaggcccagcctttaagcatcccccaccccctgccaccactggcactaggaactaggtcatcttggcctcttctggctggtggcagctgggaggagcagcccctccgtctgtcgcctccctcctcatccccacagcagctggccctagtgcctggctccaggctctctccagcccagggcagccaagctcttggagtatgcccacctgggagcccagtgcctggttccctgctcagtgctttgcctctgggcaaaggggttccatctacagtggaggggtgccttgggatctcgatcctcaccctgcccccctgcctgccctactcacgtctcctttgcaaccccccatcttcccctgtggcttgcatacacagctctgacctgtcagccgcctcttaaaccatcccataaacagtccctcacatttgggctactacccttcacatctctgctttcgcccatgtgtggggacttctgccttcaagcactccacttcagtcctccagaaaactcctattcaatgttcaggactcctctcaaacttctcctctccagggcattccctggtgcacttgggcagagttcctggctcctgggctcgccccccagcactctgggtggcaggaggaagcccctggtgtggcagttcctccgtcaagtggtgcctgtcccagctgactgtgagggcagggactgtgactcattcatcctggcaccgggtccatagtagggagaataagaggtgttgaggacttcccccacttaatcctcttcttagctttataagatagacatcctcggtttgcacattgggaaactgaggctcaggaagtgaaagccatttgccaagagggtaggtagagaagtcaggattcagattgcctttgctgccgacaggctgagaattctagcctgcccgcggctgtaagcttgcggctgggctcagtgagactgagcctcggaaatcctatgcaaagcatttggctgcagagtcgggcaggggtttggagatcatgggaggccctcactgagtactggagtttcactgtgcctcaccagcaccccgcctatcttctgagtagcatctcctccagccagggcttgcatacttctgaggacggggagcttaccacctctcatagtggctcatcttgactgagacagttccaaggaggaagctgtcctcacacagctgccagctgccttcctgccacttctactcatgggtttttattcctctaaagggcacagagcgcagctgcattccccatcactgctagctttcagagcctgcctgttcctgccctgcctcttcccactgtctctcgtccccacgtacctaggcatgagccaagtctcacgatgaccagtgacccactgcctcccacaccaagtggccttggggactggcccaaggctattttggggttttccctgatcctcctccttccacagcctagaaactgccaaggccctaaatatagaggccccgaaagtagccagacaggccagtggcaactggctcgggaaaggagaaatgagagaggtgggcagcctaggggcctcaacactagcgaagaaggaactgggcagggcttgggtcccagcagcccactggggaccatggttgggcccaggtccttaaatctggcctcggcctgctctcaataccgtcctcttgccccacctctgatccagccacccggctcttcatagtccttgcacaccaggactcgggtcctgcttccaggcctttggaagcagtagcagcccagtagtgggggacagcccacggaggtcccctgttgcctcagtcagtactgacctctccctgcctcctctgagctccttgtatggctcctggatcctgcagcccagcccagcacctggggtgttcagaggcctgatttcttagcacctggagtcccctggctttgggttgatgggatgcaagctggggtattcacagggggctccctggaggtgggggggctctttattttattttatttatttctgagacagagtcttgctctgttgcccaggctggagtgcagtggcgcgatcttggttcactgcaacctcctcctccggggttcaagggattctcctacctcagcctccccagtagctgggattacagttgtacaccaccactacattcggctaatttttgtatttttcgtagagacggggtttcaccatgttggccaggctggtctggaactcctggcctcacgtgatctgcccacctcggcctcccaaagtgctgggattacaggtgtgagccaccacacctggccaggaggcgggggctctcaaatgatggcagggggaggttacagtcagagatgcaggcagtgctaacatttactgagcacctccaagaccttctctatcgtctcaggacccagggaagctcccttgtgagccggggttacacttcccactttataggtaggaaaactgagtcttggcagacatttcctgtctgtgtccaggagcttctggagctgttggccccaaatgccttcctctgccggaagagccccttttgagaagggaagcagagcttggaattccccaccctccaccatagaaacacacttcctttttatggacactcactggaggaacagctctagagacagccctcacttccccacttttacccagtaccagccctaggcctggctgcaggcctctcccagccccaggagccccccaacacctgagacccttggaactgagcgcgtgtttgccttcccccatccctctttccccagatagctgttacatttattcattcattcactcatcagttcattcattcgtctgttcattcggcaaacactcatgggctgcctgtcttgtgccaagccctgtgggggccctggggacacaggcatgctccccgcccccaggtagctcagagcaggtgggaggcagctgatcactaccaggctggatgaagtgggcaggcagtgtgagtccagggaggccttcctccccgtcccgtcctggggcgagggagggctctggcagggctgaaggccgactgggcaggagggacagcggtgtcggtgttggggagagcaggagcaaaggctccagggagagtaaggggctcgactttggtgtggagggtaggggtcccaggagcttgcctggggctgttgcttggagctgttctggggggaggcagggatggggtaggagggcatagaaaggaggaacattctatcccctgcgggaggaacaggaggtttccagtaccccctccctctgtccctctccctcccctccctgtctttcccctctccctctctacccctccctctcaccccctccctcagtctccccctccctctttactccctccctcttactctcctccctctctccccctccctctcaccccctcactcagtctccccctccctcttactctcctccctcttactctcctccctctctccccttctctctctcccccctctctcaccccctcagtctccccctctgtcttactctccttcctcttactctcctccctctctccccctcctactctcctccctctctccccctccctcttactcttctccctctctccccctccctctcaccccttccctctcaccccctcactcagtctccccctccctcttaactccctccctcttactctcctccctctctctccccctccctatcatcccccttccctcttaacccccacctctctcctcctccctctcagccccctccctctgtctcctcttccctctctctcccctccctgtccgtccccttccctttctgcccctccctctgtccctctcccagtctctccccttcctccttccccctcctttcttctcctttctctctctacccatccctgtctcctccccctccttctccctcccccacaactctccctccatctactcccacccctgcccgcgaaaggggagccctggtgcgggttcctgcccttccctcaccatccgctcccgggctgagggcggggacccgtgtttggccggaggagcctgcggtctccaaaccaggacgcggagactcagcctccgctctcttcccccgcactcctcccgaggggccaaaagagagaggagcctgccgcgagtccccgccccgatcccgccctccagccccgcccctgcctatttgtcttgcagcactggcagcagcgacccctactgcatcgtgaaggtggacaatgagcccatcatcaggtaccgcccccacccccaggaccgaggggcgctcagcctctcatcggcccgcgctctccccgcaaaggggtgtgaattttgttgtgaattttgtacggagatgggagggggcttggagcacctggtcccctgcctgggattccccacctcgccctgacaccccagctaggagacgagaaagaccttcagggaactggcctggccaagggcctctcaccggactctgttcatctttgcaatcatcacaacctccgggagagacagatgctgacgatttgtaacaacaactctcatttgtggagccagcccttttccagcccgtttagttcttgcaattaacgagatacgatatcattagaccccatttacagacaaggaaactgaggctcagggagactaactaccctggccaaggtcacatgcctagtaaaagtggcagagccacactggagcccaagtctggccaccccagagcctgagctcccttcccctccctggtcctggctctaacttgggtcctgtcccctgagagtcccatagtaatatccctcgaggctgggcaaccccagcctgcaccctgaagagtcacttcctccggatgtcccttcctccatggtccccatgatctctgggcagggtctttgctgtcctctcccttccttcacccagactcctgcttccaagttcatggccagagctgccctactgttctgcccacctgagtgcccgtggcctactcggagcccagtccttccctacctgcaagcaggctcccagcctttctcgagggtctgcaaaccacagacagcaagagggagaggggtgtgatggctctgatgctcttgatacagaagggaaacagatgacctgtctgagaagtggttggcatgaggtggtcccctgaactttcatccgggtccttgggggcttcagcgtctccccacccgctagcccactgagtcccatgagttgaaggctctgatccaaagggggttgaccagagctgggtgaggatgtgaggccaggctcaccagtcgccctgaggcagctaccctgtgacctgaggccaatgcctgccaactgtgatctcagtttccccaaatgtaaaacagctggagaggctgggcacggtggctcacgcctgtcatcccagcactttggaagtccgaggtgggcagatcacctgaggtcaggagttcgagagcagcctggccaacagggtgaaaccctgtctctacgaaaatgacaaaattagctgggcgtggtggcaggcgtctgtaatcccagctactcaggaagctgaggcagggagaattgcttgaacttgggaggcagaggttgcagtgagccgagatgacgccactgcactctagcctgggcgacagagcgagactccgtctcaaaaaaataaaataaaataaataacagccagagagaggcagccctgtgccccatccagagcagagaggaatgtcagggggtagtgattggtggtgaacagtagggtctggcacagggaaaacacatcagtggcagagccagttgttataggggtaggggaagatacaaggaaggtcccagcccagggcctgggagtggcctgggcacatgctgagggttctctcctgcaggacagccacagtgtggaagaccctgtgccccttctggggtgaggagtaccaagtgcacctgccgcccaccttccacgctgtggctttctatgtcatggatgaggatgccctcaggtgagtgcccccctctccagctgggacccagacctggccatctgattgctccctggcccatttcaccaccaggactcctgggtcctttttggcatcctctttgcagcctggagggaggcagagcctgggggcctgggagggcgaaaagcttgagcgtgtgggtgtgcacatgcgtggctccatggtgcatgcgccacatacacacgtgtgtgtgcaggcatgcaggcacaagtgtgcatggactacacgtgtgcgtgcaggtgtgagctgtgagatgggcacccagagagtgtgagcttggcatgtgtgggcatgtgagaaacctatcacatccccctagagggtccagaacccacagcctacagaagggccacaggtccagctctgttgggttactctggaaatgacagcggtgtccaccaccctgctccccccgggggggccctgaacttggtgggaggtcccagagggcagatactgaagccctgcccagctctgcctccgtctccctcctctagccgggacgacgttatcggaaaggtctgccttacaagggacaccatagcctctcaccctaagggtaagttctcccttccctcccacactggtctgcccagtccctggcctccctcccactcggagacctcccctctaggctccgtctggtctcctgctcagggaaagccatttctactctccccagaagccggggccacgttctgtactcctggcctctgttctgcagcatgttcccaagcctggttgttactgcctcttccctagggtgaagaggggctgctatgggtggaatctgaggcctctgctggcagaagaaggggcctccttacactctattgctgaagcatagggaccccttctccaaatcaggccagctccttctgtaacccatggggtcgcctccatctgggccctagtactactgtgtcctaagtctgaagggttggcctagagccagtccaggctggagatccctttcaattatttctgggatgcagacattgttttgtgttattgtttttacaatttttatatagtttttttttaaaaaaaaggccgggcacggtggctcacacctgtaatcccagcactttgggaggccgagacgggtggatcacgaggtcaggagatcgagaccatcctggctaacacggtgaaaccccgtctctactaaaagtacaaaaaaattagctgggcgtggtggcaggcacctgtagtcctagctacttggcaggctgaagcaggagaatggcgtgaacctgggaggcagagcttgcagtaagccgagatcgcgccactgcactccagcctcagcaacggagcaagactccacctcaaaaataaataaataaataaatgaataaaaaataaaaataaaaaataaaatagaggccgggtgcagtggctcacacctataatcccagcactttgggaggccgaggcaggtggatcacctgaggtcaggagttcaagaccagcctggccaacatggcaaaactctgtctctactaaaaatacaaaaaattagctagacgtcgtggtgggcacctgtaatcccagctactcaggaggctgaggcaggagaatcgcttgaatccaggaggcggaggttgcagtgagtcaagatcacgccattgcactccaacctggatgacagagcaagactccatctccaaaagaaaaacaaagatggaggccgggcatggtggctcacacctgtaatcccagtggcaattcacttgagattaggagttcaagaccagcctcgtcaacatggtgaaaccctgtctctactaaaaatataaaaattacctgggcatggtggcactcacctgtaatcccagctactggggaggctgagacaggaaaatctcttgaacctgggaggcagaggttgcagtgagccaagattgcgccattgcactccagcctaggtgacagagcaagactctgtctcaaaaaaaaaaaaaaaatggagatgggggtctcactctgttgcccaggctggtcttgaactcctggctttgacagatcctcccgccttggcctccccaaggtgctaggattacaggtgtgaaccaccatgctctgcccagacatgattttgagggttcagccctgtgccagcctcactgtgtgtgaccttgggcagctcctgccttctctgggcttctctgagggttcaaaccagttcttggatgctatgggctctgccatcagagcctttgtgtcccgcttactggcttccccccacacacacctgctcctgtctgtgacgctgggccagggatgggggcagggcgaaggcaggttctgctgactcatggggcttcttggcccctgccaggccaaaggcctttcccacctgcagccttagccagcgtctctggggtctagtggccccagtgaggctattcctccgggtgccttgtagcttccccatccaggcctcagaccctcctcccagcagccctaggggagggccactctcttcctgttttaagatggggaatctggctgggtacagcggcccacactcataatcgcagcaccttaggaggctgaggtgggaggatggcttgaggtcaggagtttgagaccagcctgagcaacatagcaagactccatcttttttttttttttttgagatggggtcttgctctatcacccagtctggagtgcaatggcgcaatcttgtagcttctccatctgggcctcagaccctcctcccagcagccctaggggagggccactctcttcccgttttaagatggggaatctggctgggtacagcggcccacgcttataatcccagcaccttgggaggctgaggtgggaggattgcttgaggtcaggagtttgagaccagcctgagcaacatagcaagactccatcttttttttttttttttttttttttttttgagatggggtcttgctctgtcacccagtctggagtgcaatggcgcgatctgagttcaagcaattctcctgcctcagcctcctgaggagctgggattacaggcatgcgccaccacacctggctcacagggtgagaccctgtctctaaaaacaacaatgacaaaaatgacacaatagtgagggcacaggccccagtcactgacttagattctaatcccagctcttccaactgctgtttcttcacctgcggagcctcagtttccccatctgtcattggggataccagcccctgcttcacgggtgcctaggggattcccagattatggaggtgcctcaaggtgcccggtggggctgagggtggagggtatgggggttcagggccgggtccctggctgagctgaccccacaggtttcagcgggtgggcccacctgacggaggtcgaccccgatgaggaggtgcagggcgagatccacctgcggctggaagtgtggccaggggcccgggcctgccggctacgctgctctgtgctggaggccaggtgagactcaggggcctgggggcgggcagtgggtcccctgcaactagagaaacccaatgaggaagctgagccccccctcgccccacctctacctcctggtcccagagctggccacctcccatcaaagcctgctctcaagagagggtctcgccaggcacggcgtctcacacctgtaatcccagcactttgggaggccgaggcaggtggttcacctgaggccaggagttcaagaccagcctgaccaccatggtgagaccctgtctctactaaaaatacaacaattagccgggcatggtggcaggcgcctgtaatctcagctactcaggaggctgaggcaggagtcttgaacccaggaggcagaggttgcagtgagccgagatggcgccactgcactccagcctgggtgacaagtgagactgtatctcaaaaaaaataaaaaagaaagaaaaaagagagggtctggggaggttttctggacttgaagatgtttcttgggtgatttccactcaaggggatatgtcccttaagggacagtctaatgttctcatggaggaactggagccatcacagaggagtggagtagggggtacgggtgaggagaccccgaactctgatcacacagcctcagtcccccagtgctaaggccggcttcccaatgtttaacgccagtgtgaacttggcctggtgggagtgtgtgtaagtgggtccctcgtggggctgggggggtgaaaagagttgctgaaaatctcccgatgggcaaattgagggttcccccaaggagggacagtggtttggatggttccatgggcctgagtcacctgtgacagggccaccccccaacccccagggtatttttagctgcaggctgcactcccgtctgggcctgggtctgagtcacactctgtccgtgagaagcgtcttcccttccggctccaaagccacctccccaagtcgctccctgcctgtgaggcaggagggtggcccccagccaggcagccctatggagccagtgttccccccacccttgaggggtcagcctgtctaagaggaagacttcccttgggcagaggggtgtgggtcggatgatgcccatgttgctcactctggcttcccgggagttattttctgtcctgggaaaatagaaatggatggaaaatgtctgggcttgggccgagcctcagccacacccccacactcgctcactctctggcctctgccattcattcccccccgccccaccccaactcacccgcttcctccatccttatcctttccaggcaccaggctgtctgggggacaggcatgcacacgtgtgcacccgctcacacacgtggccgggctctgggacctcggggccacttctcccaggcacccatcgtcacccacggagatgggaggcatggaagcatgtctccctggccctcccctctctccaggaatctcccctgtcccatcctctggggccacagtggttggccttctagtgagtcctagcaggggagaggaatgtccaggcctctctcagagtgaggggacttgtcccccgttgtcctcggcaatgagactcctgctgcaattccaagtcagcctaagaaggtccatttgctgcggagaaagaaagaacatttcctcattttttctggggagattctcaatatttcagtaaaaccttggggtttttttgttttttgtttttgagacaatctcgctccatcatccaggctggagtgcagtggcccgatctcagctcactgcaacctccaccttctgggttcaagcaattctcctgcctcagccttcctagtagctgggattacaggtgtgcaccaccacgcccggctaattttttgtatttttagtagagacgggacttcactatgttggctaggctggtctcaaactcctgacctcaggtgatctgcctgcctcggcctcccaaagtactgggattacaggcgtgagccactgcacccgggctgtttttttttttttttggtgggtttttttttttttttttgaggcagtctggctctgtcgcccaggctggagtgcagtggcgttttcttggctcactgcaacctctgcctccccaggttcaagcaattctcctgcctcagcctccttcccaaagtgctgggattataggaatgagccgctgcacccagcctcaatgttggggttttattagacagtcttgagggggaagaaaggcaggtatgagaggcttaaaatatcaaagatgagtgggctttggtgttcttccacaaagagttctaagtaggggatactggcagggtgcagtggctcactccagtaatcccaatgctttgggaagcagaggtgggaggatctcttgaggcccagatttcgagaccagcctgggcaacagcaagatcctgtctctacaaaaaaatttaaaaattagccaggtgtggtggggcacacctatagtgccaactacttgggaggctgacgtgggaggattgcttgagcccaggaggtggaggctgcagtgggctatgattgcatcactgtactccagcctgagcaacagagcaagaccctgtttaaaaaaaaaaaagaaaagaataaaagggccaggcgcggtggctcacgcctgtaatcccagcactttgggaggccaaggcaggcggatcacctgaggtcaggagttcgacggcagcctggccaacctggtgaaaccccatctctactgaaaatacgaaaattagctgggcgtggtggcaggcacctgtaatcccagctactcaggaggctgaggcaggagaattacttgaacccaggaggcggaggttgcagtgagctaagattgcaccattacactccagcctgggcgacagagcgagactccgtctcaaaaaaaaaaaaaagctggaggtaccgtgactagactagggctgtgtaaagacccatctatggagaaagggcagggccgcccatcagggctgcacctcactcctccaccaagtagagcgacattactggcagaccttccagaagcacactctctccctaaacctgagcccagtagcgattcacttttccattttcctgatgaggaaaccgaggcttagggcagccctgggaatggagggccaggaacattgccccggcggttccctggcagcactcacaccacccccctgccacccccagagcaaggtgcagccactggcctgcagctgcctggtgggaaggacccatggcctctaccttggggggttcttggccacatgggcgatcctggggagatggctatgggagcagggcccagaaagggcagaggcgcactgtccacagtcagcttgccagggacggaatgtgcccaggccttttggcccgctgtggttacataatggtggtgacaagtgggggagggggggctcagggacaagtcgatgatccaatcttcctccacccccaccagggatctggccccaaaggaccgcaatggcacatctgaccccttcgtccgagtgcgctacaagggccggacacgggagacctcggtgaggaggccagagggcagggaaggggcagggggctcgggggacgtgccagccacgcccccattgctcacctcaccacctgctcaccatccgctggtgggacagattgggggccacagtcttacagaggaggcccagggaaaggggcgacctctctgaggggacataataggtcccaggacctctggggccaacttcgctcactcccggccatgcttgggggtaaggaggggattgagacagccggagtggggtttatttgggaacacccatgctgccttccccacccccaggaaatgtccagagtcgagggcccagtcctgggcacgaagacaccaaggtctgctttctcagtatagtcgctactgtttttgttttgtgtttcgtggtgttttttttttttgaggccaagtcccaccctgtcacccaggctggagtgcagtggctggatctcagctcactgcaggctctgccttcccagttcgagagattctcctgcctcagccacacgagtagctaggattacaggcacacaccaccacaccaggctaatttcttgtatttttagtagagatggggtgtcaccatgttggccaggctggtctcgaactcctggcctcaagtgatcctcccgcctcggcttcccaaagtgctgggattacaggcatgagccaccacgcccagccctgtgttttttgtttgttttgctctgtttttaaatattttatttccacaggttattggggaacaggtggtgtttggttacataagttcttagtggtgatttatgagattttggttcacccatcacccgagcagtatacactgcacccaatttgtagtcttttatccctcacccccttcccacccttcccccccgagtccccaaagtccactgtgtcattgttatgcctttgcgtcctcatagcttagctcccacatatgagtgagaacataacgatgtttggttttccattcctgagttactacacttagaataatagtctccaatccaatccaggttgctgtgaatgccattaattcattccttttttatggctgagtagcattccatcgtatatatataccacagtttctttatccacttgttgattgatggacatttgggctggtttcacatttttgcaattgcgaattgtgctgctataaacatgcgtctgcaagtatcttggccaggcacagtggctcacacctgtaatcccagcactgtgggaggccaaggctggcagattgcttgaggccaggagtttgagaccagcctggccaacatggtgaaaccccgtctctactaaaaatacaaaaattagccgggcgtagcggcaggcccctgaaatcccagctacttgggaggctgaggcaggagaatcacttgaacccagaaggcggaggttgcagtgagctgagatcgtgccactgcactccagcctgggcgacagagcaagactgtttcaaaaacaaaacaaaacaaacaaaacaaaaacatatgtgtgcaagtatcttttttgtataatgacttctcctctgggtagatacccagtagtgggattgctgaatcaaatggtagttctacttttagttagttaaggaatctctgctgttttccatagtggttgtactagttcacattcccaccagcagtgtagaggtattccctgttcaccacatcctcatagtcagtactgttttgctgtgtggccttggatacatcttttccccaccctgggcctcagttctccctatctcagaaatgggtgggagcttggacaggacattttaacctctgctgtggcagaacctccaaggcgaggaggctgtggggaacccaggggaggtgtctagggcagctctgccttttgcccagcctggggagtccagtggcatcagcctaaccccctcccaccctcctctgggcagatcgtgaagaagtcatgctacccacgctggaatgagacgtttgaatttgagctgcaggagggggccatggaggcgctgtgcgtggaggcctgggactgggacctcgtcagccgaaacgacttcctgggcaaagtgagcaccaccgccccgccccccctcctcccccggcaggctgcacctgctgtcccccagcacctggttccattgcagccatcccatcctcagggacctccctccggcttccccaaagagggacactcaggaagcctgggactacccccccacctccaccgtctgccagaaccagcaacttccccccaccaccactggcactaagggacccttggaaggggcccctccccactaagaacagtagttggcaaggaggagacgtaagtctcccagctccaggaaaactgccactatgtccccaggtggtgattgatgtccagagactgcgggtggtgcagcaggaggagggctggttccggctgcagcccgaccagtccaagagccggcggcatgacgagtaagtgcatggagctgggcagccggcctcaaggggtggggtgggggctgacatttgggaattggctacaggcaggcagggcaggggggctgctcagggtgagaggtcaggagacacagctccagggtcccctcagcccctgcccacctagccagcatccttctcatcctggctgggctccacctcccctttatttattatttatttatttatttatttatttattttgagatggagtctcactctgtccccaggctggagtgcaatggcgtgatctcgactcactgcaggctccgcctcccgggttcacgccattctcctgcctcagcctcccaagtagctgggactacaggcacccgccaccgcgcctggctaattttttgcatttttagtagagacagggtttcaccatgttagccaggatggtctcaatctcctgaccttgtgatccacccgtctcggcctccccaagtactgggattacaggcatgagccaccgcgcccggcccctcccctttatttttccccacagttctgcattcagctcagctctgtcttctgtcttttttttgagatggagtcttgctctgtcacccaggctggagtgcagcggcacaatcttggctcactgcaacctccacctcctgggttccagtgattctcctgcctcaacctcctgattagctgggattacaactgtgtaccaccatgctcggctaatttttgtatttttagtagagacagggtttcaccatgttggccaagttggtctcgaacacctgacctcaagtgatccacccgcctcagcctgccaaagtgctaggattacaggcatgggccaccgcacccggccaggtctgtcttcttagctcacaggttgtacaggtctcctgctttctgcctctggaagtttctgaaacaagtactcagacattttccctttgaaaatttccctgcagacctcagaccagggttcaagtctccaaggtcagtgtccctgagccatagctccaactccctatgccagattctccaggaatagggttgtgagataagataggacaccattggccaggagcggtggctcatgcctgtaatcccagctctttgggaggccaaggtgggaggatcacttggggcaaggagtttgagaccagcctgggcaagaaagtgagactccgtctctacaaagaaataaaaattaggccaggcgcggtggctcacgcctgtaatcccagcactttgggaggtcgaggtgggcggatcacctgaggtcaggagtttgagaccagcctggccagatggcgggcacctgtaatcccagctactcgggaggctgaggcaggcagaattgcttgaaccccggaggcagaggttgtagtgagccaagattgcgccattgcactctagcctgggtgacaaagctagactctgtctcaaaaaaaaaaagaacacccagttaaaacttaatttcagataaaagtgaatatatatatatatattttttttttttgagcagaatctcactctgtcacctaggctggatggagtgcagtggcacggtcttggctcactgcaacctccgcctcccaggttcaagcaattctcatgcctcagcctcccgagtagctgggattacaggcatgcacctgtaccaccagtacagtggtgatcatagctcactgtagcctccacctcctgggtgcaagcaatcctcccatctcaacgttccaggtagctaggaccacctcacctggctaaatttttgtagttttagtagagatggggtttcaccgtgatggccgggcttgatgttgaactcctgacctgtgcccggctgtgaatacatttttagtataaaaataaccgctgggcgtggtgactcacacctgtaatcccaacactttgggagtttgaggtgggtggatcacttgaggtcacgagttcgagaccagcctggccaacatggtgaaacaccgtctctactaaaagtacaaaaaatggtggtgggcacctgtaatccaagctactgaagcaggataattgctggaacccaggagacggaggttgcagtgagccgagatcccaccactgcactccagcctcggtgacaagagcgaaactccgtctcaagaaaacagccgggtgcggtggctcatgcctgtaatctcagcacttgggtggccgaggcgggtggatcatgagatcaggagttcaagaccagcctggccaacatggtgaaatcccgtctgtactaaaaatacaaaaattacccggatgtggtggcgggcacctctaatctcagctacttgggaggctgaggatggagaattgcttgaacctgggaggtggaggttgcagtgagccgagatcgcgccactgcactccagcctgggtgacagagcaggactccatctcagcaaaaaaaataaataaataaagaagaagaatgaccatgcactatttgagacatacctatactaaaaatattcaaatttaggccgggtatggtggcgcatgcctgtaatctcagcactttgggaggccaaggcaggaggatcacttgagcccaggagttcaagaccagcctgggcaacatagcaagaccccatctctaaaaaaaatagttaataagtaaataaaatattcacatttaactgggtgtcttgggtcgttttgctaaatctggcagcctgtctaggaagccctctggcttgtttgctgtggcccacagccctcagtggttcagctttgtgtctctgtggaaggccccagacccccattcccccagttcccatccttaacagggtaggagcaggtggacggctgtgtgtccagcacaaggtgtttccatagaaccagccaaggcccatcttgccatcttattttttatttatttattttttttgagacagagtcaggctggagtgcagtggtgcaatcctggctcactgcaacctctgcttcctgggttgaagcgcttctcctgcctcagtctcccgagtagctgcgattacaggcacctgccacaatgcctggctaatttttatatatatattttaatagagatggggttttgccgtgtcagccaggctggtcttgaactcatgacctcaagtgatctgcctgccttggcctcccaaagtgctgagattacaggcatgagccactgcgccaggcccaggggcccatcttaacactgctctgtgcatgaggcttgtgctgagcaggggcagtgggagccttagaggttcccacttggtccacaccctcctctgttctgaacttccctatcagaacagggaagctgggaagctcaatctaatgtggcaagttgctgaactggctcgggtctcagtttccctattaggttgttatgagggttggggatttgcttctgctgtaaagtgtacccatgatggtgccattatctgggagttgatcgattcaaggctggcagctccacatacccaagcttggaggtggcagggagccagacctcgaagacagatagaggtgccttgagtgcagagacaggaagggctttccaaaaacagaaaataaatagcccgggcagagcctgggaggcagagctatgcagggcacccgaatggagggcatgagcagagagatgggaagccggccccaagggaaaaaactggaggccatgggagtggtgtggtccagggtggcctgagtccctggtggagaggtcacaggctgcccattccaggggcaacctgggctccttgcagctggaggtgcggctgcgggacgagacggtgctgccctccagctactaccagccactggtgcacctgctgtgccacgaggtcaagctgggcatgcaggtgagggggcctgggcagggtgggagggtccagtggcagtaggcctgtgcgcctgtccttctaaacccattctgcagagcagaaacctgaggtctggggatgtgaggagctggccagtgtccagggccccgtccccagccaccccttgggaaaatgtcctctttccctgggatgctctgaggtcctcagagggaaaggttcgggatcccccgtgcctctccctgcagggcccagggcagctgatcccactcatcgaggagacaaccagcaccgagtgtcgccaggacgtggccacgaacctgctcaagctcttcctggggcaggggctggccaaggacttcctggacctgctcttccagctggagctgagtcgcaccagtgaggcctgggaaggagctgggcccagaacactgggaggtgtttgggggtgggtgggctcctcctgtaggaggcagatggggtcagagaggagggaggcaaggaacagagccaagggcagaggtgggacagtgggctgggaggtggcgaggaggccctttattgagggggcagcttagatcccccagacccaaggtcctctgtcctccccctcccccaaaagctttgtgccagccccctacccactgggacctctgtttgtaggtgagaccaacaccctgttccggagcaactctctggcctcaaagtccatggagtcttttctgaaggtgaggttgcatgctatattgtcctcatcttgcaaatgacaacactgagcttcagagagagcgacagagggggctgggacttcgactccagtgttctatctccatattcagagccctttaaggttaagaatgtggctgggcatagtggctcatgcctgtaattgcagcactttgggaggctgaggcgggcggatcacttaaggtcaggagttcgagaccagcctggccaacatggcgaaaccccatctctactaaaaatacaaaaattagcctggcatggtggtgggcacctgtaatcccagctactggggaggctgaggcaggagactcacttgaaccaggagccagaggttgtagtgagctcacgccactgcactctagcctgggccccgtgctagactccgtgccccgcacccccccgccaaagagaatgtgtgtgtgattaaaatttaagttagaaacagtctcactatgttgcccaggctggtctcaaactcctggcctcaagtgatcctcctgccttggcctcccaaagtgctaggattacaagggctaagaattctagtcattcattcactcactcattcattcattcatgaataaacagtttgccctgcatgtgtacctggccccctcctgggcggatacggcaggcaaacggtgcaagggcggctgccgggagaaggtgggcagctggagtgggactgggggagacaggatcaatgtgacctgcggtggtccccaggtggccgggatgcagtacctgcacggcgtcctgggccccatcatcaacaaggtgtttgaggagaagaagtacgtggagctggaccccagcaaagtggaagttaaggatgtagggtgaggccgggggtaactccgggggttgcggggtgcagcggcagcgggttgggatcaggccctgtcagcatgtgtgtttgtgcttctgcccacccgtgtattgtcccctgtgtccgtgtcctggctgctgtgagagccactgttcctgtcgtggccctggcgctgaccgcgacctcctctgccaacccgccccgttccacgcaggtgctccgggctgcaccgcccgcagaccgaggccgaggtgctggagcagagcgcgcagacgctgcgcgcccacctgggggccctgctgagcgcgctcagccgctcggttcgcgcgtgccccgccgtggtgcgcgccaccttccgccagctcttccggcgcgtgcgcgagcgcttccccggcgcccagcacgaggtgcgccctccacccgctgggctaggctgggccgggttggactgggctggggcgaggggtgaagagcggtggggaaccagggagcgctggggaggaccagggaggctgtgtcccagcgagggtcagggacggagcctaaggggagggggctgccaggagccctggtctgggggactccagcccgcgctcttccgcacccctccagaatgtaccgttcatcgccgtcaccagcttcctgtgcctgcgcttcttctctcccgccatcatgtcgcccaagctcttccacctgcgggagcgccacgcggacgcccgcaccagccgcaccctgctcctgttggccaaggtgcgggccttgcggccacgggcgggatgcacagctgggtgtcctaccggggccctggcctggactgcagagtgttccctaccggctccggcgaggccactggcacgcccacgtaggcactgcacttcacagtttgcaaagccttcctgtggccaccttgtccgagctccatctcatggataagggaacaggcctgcgaggggtcgggggttgccaaggccgcccatcctgtcggtggtgaatcgcgggaccttccaacccgggtctgcttactctcaggctgcacctatgtgcccggcaccggggtggggtatccagtgcagcagcgtcagttaaacctacagaggaaggcccaagtggtctcagttatcataaggcatcaaacttcatgatcctctcctccctgatccctagtggggctggagggggcccgtgggcatggcctctgtcgcctctgcctccatcgctacagctgagtagcaaagacttggggagggggggtgggagggggtgcagtggctaggcccctaacctagcagaacctggtccttcctgctgtcacctccaggcagtccagaacgtgggcaacatggacacgccggcttccagggccaaggaggcttggatggagccgctgcagcccaccgtgcgccagggcgtggcgcagctgaaggacttcatcaccaagctcgtggacatcgaggagaaggacggtgagcgccgccctgcacagacccgcccacagcctactgctgacgtttgctccgcccttgagccccacggccccacccatcgctgtttgttcctctcgtggccccacccaccgcctgctgttggcatttgccaggcccccaggccatagacccacgcaccactgtttgtgcttcctgtgaccctgcccactgcctgccgttgacgtttgccccacccctagacccatggcctcacccccccatcatctgtgcctgttgacatttgctccatccttgagctccatagccccgccgccacctgctactgacgcgtgtcccgcctccaagcccatggccctgccttcctcagtccacctgtcaccccgctcaccaccagctgttgatgtttgctccgcccttgagccccatgactacgtccactgcctgctgttcagatttgctcagcccttgagccccatggcccctcccactgctccgctccccccagtcccgccctcattcactgggctctctattcccctccctccctggcctggcagagctggacctgcagcggacgctgagtttgcaggcgccacctgtgaaggaggggccactcttcatccacaggaccaagggcaagggccccctcatgtcctcctccttcaagaagctctacttctccctcactaccgaggccctcagcttcgcgaagacgcccagctccaaggtgggtaaggagggaggccggcaagtggggctctgagaggccggcaagtggggcacctgtccccttccttggagcccacttgaggtacccccggggtcagagaagaaagccaggtgtgtggcatctgtactgcttgtcagaacctaggagggccgggcacggtggctcacgcctgtaatcccaggactttgggaggccaaggcgggtggatcacttgaggttaggagtttgagaccagcctggccaacatggagaaaccccgtctctactaaaaatacaaaaaatcagccgggtgtggtggtgggtgcctgtagtcccagctactcgggaggctgaggcacgggaatcgcttgaacctgggaggcagaagttgcagtgagccgagatcgtgccactgcactccaacctgggcaacagagcaagactccgtctcaaaaaaaaaaaaaaatgaatatggaggaagttgatccgaccttaccaggttgttgaggattaaatgagatgatctccctaagggtcctgacccagggcctggcaggtagtactatttaggcaaatgatattattaaagatagtataacacctgggctgctagatgagtaggaggctagggcaaacaggggaggcttcctggaagaggcaggaatatagaagcacggaatcttggcgtgggaagggatctcaaagatcaccttgtacagccctctctgagtcatgggtcacctctcctgcaagctctcttctcccaggaagggctgaggacatacttcctccatggacctggtgactgcttgctgtacacctgcccccagtcatgcaggctatggggatgatcttccaggagtacccagcctagccctgggcaggtgagagcgggctaggagtaggtgaaggagctcatcacccaccctgttctcaaccagctcaggggtcccaccagatgaggggcccgccccttccgaccaaagacccctcagatgatgataattattttttgagacagggtcttgctctgtcacccaggctgtagtgcagtggtgcgatcatagctgaccgcagcctcaaactcctgggctcaagcaatcttcctacctcagcctcccgagtagctgggactacaggcacgtgccaccaagcccagctaattttctttaacttgtttttttgcggagatgggggtcttgctatgctgcccaggctgttctcaaactcctggcctcaggcaatcctcctgccccagcctcccaaagcactcagatgattattatacatcttccttgcccgggttgaaagatttgactacatgggcattatttaattctggtcccattttttttttttttttttgagatggagtttcgcttttgttgcccaggccagagtgcaatggtgcgatcttggctcaccgcaacctccgcctcccgggttcaagcgattctcctgcctcagcctcccaagtagctgggattacaggcatgcgccaccatgcccggctaattttgtatttttagtagacacggagtttctccatgtttgtcaggctggtctcgaactcccaacctcaggtgatccgccttcctcggcctcccaaaatgctgggattacatgtgtgagccactgcgcccggtcaggatatgactattagagcctgggactacaaaagcaagttggaaaattaataaatgcaaagtcacaaagccttggccacggccggattgactttgtagcccagggaatgctggctgtcccgacactaccccaaagctcacacctccgaggccttctgggagtgccccccagagaggccaggtcctcctctcccagttgctgggcacttggtcaccatcagtctgtgctctgccctggctgaggtcactctaggtctcccatgcctacccctggtgctgcagaaggggagactgaggcccagagatggggaatggaatgcccctggctaggtccctgagcctcctcctccctgcctgccccagaaaagcgccctcatcaagttagccaacatccgggcagcggaaaaggttgaggaaaagagctttggcggctcgcacgtcatgcaggtcatctacacggacgacgccggcaggccccagactgcctacctgcagtgcaaggtgcggggaggggagcgggtgctgtgggagtggcctgaacactgtgggagtggcttgggtgctgtgggagaggcctgggtactgtgggagtggcatgagtcctgtgggagtggcctgggtattgtgggagaggcctgagctctatgggagtggcctgggtgctgtgggagtgccctggatgctatgggaatgccctgggtgctgtgggaatggcctgggtgctatgggagtggcctgagctctgtgggagtggcctggctgctgtgggaggggcctgagtggactggatgagaaaagagttgattgagcctctcgccccgctaccagctacatcaggcaccgcagggtgtgtctaatctgggaggtgtcagggacaggtgtgtgtgtgttgtccaggggcctgagccccaggaggccatggcccatgtctttccctgggcatccatgtgtaggtctgtgtgtgggccagtgcacagacaggtgcatccccgtgatgtgaaatttgcacgttgcacccgtttgttggaaactatttccagataactgagatgggggccaggcacgctggttcacacggataatcccagcattctagccagggcaacagagcaagaccctttctctaaaacagaaagtctgagctggcacctgtgtggttctgtgtctgtatcaatgcctaataatcaaacattatgctgtgtgtggctctgggtgcatgttctcaagtaaccttctcatctgttccttcattaactcattcattcatttatttaaaaaatacttactgagcacctcctaggttccaggcatgattctaggtgaggggatacagtggcagatgaggcagagtcctgccctcatggagctgatatccctgggagaagatgggccaataaatacatgtttcaaatgtcggctcatgcctgtagtcccagtactttgggaggctgaggtgggaggatcactggaggccaggagtttgagaacagcctggccaatgtagcaagaccccatctctacaaaaagaaaattagccagccatgatggcatgcacctgtgattccagctacttgggaggctgaggcaggaagatagcctgaacccaggagttggaggctgcagtgaactatgatcacaccactgcactccagcctgggctacagagtgagaccctgtctcttaaaaaaaaaaaaaaaaaaaaaaagcaaattgtgatagtgacttgaagggaaccagaagggactaagggagcaagggagggaagagagtggggtatagcagggagcggtctgtcctattaagagtggtcagggagagtacaaaaagtagccgggcgtggtggcgcgtgcctgtagtcccagctacttgggggactgaggcaggagaatcgcttgaacctgggaggtggaggttgcagtgagctgagatcgagccactgcactccagcctggtgacagagcaagactccatctcaaaataaataaataaataaattagtaaattaattaaagagtggtcagggaggacctctgatgggtggcattcgagcagggaccttgtaggagggtgacccagatgtgtatctagggcagggacatgtgggacaagtaagaagcctgcagctggaggggggttggtttcttccgggcttgaccgtcctggcctgtggggaggaagtcacagacctgtccctctgtgcccttccctctaggagttcccttttgtgtcagggtccagagccactgggaaaagtagtgatatcagggccaccaaatatatttggcgggttctggaatacctacgagcgtggccaaggggccagcggcggctgaaatccagcccacaccagcctcctgggctcctaccatcccggtgccttccgtggggacaagtggagctgctgccaccaaaaagacgagacaggtgggagaggagaggatgaagtcttgctgtgttgcccaggctggtcttgaattcctgggctcaagcgatcctcccacctcggccccctataatcccagctgtagtcccagcactttgggaggctgaggtgggaggatcactggaggccaggagtttgagaacagcctggccaatgtagcaagaccccatctctaaaaaaaagaaattagccagccatgatggcattataggagtgagccactgggattataggagtgagccactgcacctgctctccaggccatgcgcccgggcatgggtcatgttccactggaggaagggcagcttctcctaattcactcaaagctgctgggttggtatggtggggaacatggcgtctggcgtggtacaggagctccgggttaggagggcttcctggaggaggtgacgtctgaacaggcctccccctccgtgtcccctgcagtgtgtgaatgagcttaaccagtggctgtctgcgctgcggaaggtgagcatcaacaacaccggactgctgggctcctaccaccctggcgtcttccgtggggacaagtggagctgctgccaccaaaaagagaagacaggtgggagaggaggcctgggtcccgggctctgcatccgtccactgcgagatcgggcctctggctgaacgatgggaccctgagccctgctgtgcacctgcagggacctaacccaaggaatgctggcccctccaggagctctgggcagaaagggtcccgtggaccaggtggtttgggaaatgccacgtgatgtgtgtgatgcatatgagtgaattcgctgaaggctctaaggaggcccgaaaacacgttagaatcccatttctttttatttcttcttcttcttttttttttttttttcagacacagactttcactctgtcccccagactggagtgcaatggcacgatctcagctcgctgcaatctccacctcccagggtcaagcaattctcctgcctcaacctccccagtagctgggatgaccggcactcgccaccaagcctagctaatttttttgtattttgactagagatggggtttcaccatgttagtcaagctgctcttgttttgttgttgttgttgttgttgttgttgtttgatactgagtctcgctctatcatccaggctggagtgcagtggtgcaatctcggctcactgcaatctccgtttcccaggctcaagtgattctcctgcctcagcctcccaagtactacaggcgcaagccactgcacccagctaagttttgtattttcagtaaagacggggttttaccatgttggccaggctggtcttgaactcccgacctcgtgatctgccctcctcggcctcccaaagtgctgggattacaggtgtgagccaccacgcccggcctagaattccatttctaacgtggtttaacccagcacttcccaaactcttttgacagggaacccttctcttccccaaggagcttcttacagaacaggtgttctcaggaacacattcgaggagccccctgctaatgagagccagagagcccctgggttcgcacactccaatgctggccatctgaatccggagctgtgggtgggaggggaccctgagccttgggcactagagggatggcatagaggagcttctagaaggactccatactgtgtagtactctaggttctagcacctgtggttcttgagcacttgaaatgtggcttgaggagctgaggggttttttttgtttaattttttaaaacagggtcttgctctgttgcccaggctggagtgcagtggcacgatcatagctcactgcagcctccaactcctgggctcaagcaatcctcctgcctcagcctctgagtaggctggcactaccggcatgcatcaccacacctggctcatttaaaaaaaattgttttagaggtggggtcttgctatgttgttcaggctggtcttgaattcccaggctcaagcaatcctcctgcctcggcctcccaaagtgctgagattgtaggagtgagccaccacatctggcctgagtttcacatttttaaaaatgttgttttggccgggtgtggtggctcacgcctgtaatcctagcactttgggaggccaaggtaggcggattgcctgagctcaggagttagagacgagcctaggcaacatggtgaaaccccatctctgctaaaatacaaaaaaaaaattagccaggcatggcggcgtgggcctgtagtcccagctactcaggaggctgaggcaggagaactgcttgaacctgggaggcagaggttgcagtaagccaagatggtgccactgcactccagcctggcgacagagcgagactccatctcaaaaaaaaaaaaacaaaaaaacaaaaaaaaaaacagaaaagaaacaaaaaacgttgttttaattttaattaactcaaatagcttcatgtggctagctgccgccctgtagaacagcacagttctagaactttcgagaccttctccctgttatccacacttactttacagagtagactcagcacttcgagtcccctgtccttcaggccaggccaaaccttggtccccagagcccagtgtggcagaggccatcgaaaactgacccacgcactctagcccagccctggatttacagccaagcactgtatagggatgggtgactcttttgtttttgtttttgttttgagttgggtctctcactctctcacccaggctggagtgcagtggcataatcatagctcactgtagccttgacctcctgggctcaagccatcctcctgcctcagcctcctgcagaactgggactacaggcacatgccaccacacccagctattttttattttatttttttgtagagtcagggtctcactatgttgcccagactggtcttgaactcctggcctcaagctatcttcctgcctcagcctcccaaagtgctgggattacaggtgtgagccactgtgcctggcctcttggtgactctttgcaagggcattgctggctggctgatatggcctgcagcctctgcctgtaaccatcagagcgatactctcattatcggcaaggtgggacccaccctggcccaagagacagggcctgttattccactgtatggaggagaagctgaggcttagggaaggcagatgacttggcaaggtcataaagacagcaagctgcaggaccagctcattctaaggcatgaaccccctgtggcccacctcaccatgatgttaacatttcagcctgctcccttccaggcagacagtcttccagaaagttacccggctccctggctgggcgcggtggctcacgcctgtaatctcagcactttgggaggccgagacgggcaaatcacgaggtcaggagatcgagaccatcccggctaacacaatgaaaccccgtctctactaaaaatataaaaaattagctgggcgtggtggcgggcatctgcagtcccagctactcaggaggctgaaacaggagaatggcgtgaacctgggaggcagagctcgcagtgagccaagatcgcac

SEQ ID NO: 612 - DNA, 1547 bp, Homo sapiens
ttttctttttttaaaaaactatataaaaattgtaaaaacaataacacaaaacaatgtctgcatcccagaaataattgaaagggatctccagcctggactggctctaggccaacccttcagacttaggacacagtagtactagggcccagatggaggagaccccatgggttacagaaggagctggcctgatttggagaaggggtccctatgcttcagcaatagagtgtaaggaggccccttcttctgccagcagaggcctcagattccacccatagcagcccctcttcaccctagggaagaggcagtaacaaccaggcttgggaacatgctgcagaacagaggccaggagtacagaacgtggccccggcttctggggagagtagaaatggctttccctgagcaggagaccagacggagcctagaggggaggtctctgagtgggagggaggccagggactgggcagaccagtgcgggagggaagggagaacttacccttagggtgagaagctatggtgtcccttgtaaggcagacctttccgataacgtcgtcccggctagaggagggagatggaggcagagctgggcagggcttcagtatctgccctctgggacctcccaccaagttcagggcccccccggggggagcagggtggtggacaccgatgtcatttccagagtaacccaacagagctggacctgtggcccttctgtaggctgtgggttctggaccctctagggggatgtgataggtttctcacatgcccacacatgccaagctcacactctctgggtgcccatctcacagctcacacctgcacgcacacgtgtagtccatgcacacttgtgcccgcatgcctgcacacacacgtgtgtatgtggtgcatgcaccatggagccacgcatgtgcacacccacatgctcaagcctttcgccctcccaggcccccaggctctgcctccctccaggctgcaaagaggatgccaaaaaggacccaggagtcctggtggtgaaatgggccagggagcaatcagatggccaggtctgggtcccagctggagaggggggcactcacctgagggcatcctcatccatgacgtagaaagccacagcgtggaaggtgggcggcaggtgcacttggtactcctcaccccagaaggggcacagggtcttccacactgtggctgtcctgcaggagagaaccctcagcatgtgcccaggccacccccaggccctgggcttggaccttccttgtatctccccctacccctataacaactggctctgccactgatgtgttttccctgtgccagaccctactgttcaccaccaatcactaccccctgacattcctctctgctctggatggggcacagggctgcctctctctggctgttatttattttattttatttttttgagacggagtctcgctctgtcgcccaggctagagtgcagtggcgtcatctcagctcactgcaacctctgcctcccaggttcaagcaattctccctgcctcagcttcctgagtagctgggattacagacgc

SEQ ID NO: 613 - DNA, 239 bp, Homo sapiens
ataggcgtgagccgctgtgcccagcctcaaacactttttctttcaacgacattgacctatagtgaatatcaaaagcatgcactgaaactcaagagctgcctcctctcctgtgccaggatgcactgtaacttttgtgagccctaggcatgtttgacttatatgggttaagatattcaaatacggctaggcacggtggctcacgcctgtaatcctaacactctgggagaccgaagtgggca

SEQ ID NO: 614 - DNA, 283 bp, Homo sapiens
cttctgcatccctcacccaattgtccctcccggctaacaagccagctgcaccccccaggcagaggtcctgcagcagtcggtataggcagcctgggcagggggcttgtcatagatctgcctctggccacgagatcttctgctccccctacggctgctagccgcagctgtccactaccccttagctttattctctctattcaggggcctcctgctgcgcactccaagggggtgcacgtttccaaagagagatcaagggacatggggaaaggagaaaggtacagct

SEQ ID NO: 615 - DNA, 255 bp, Homo sapiens
aggctggagtgcagtggcgcgatctcggcttactgcaagctctgcctcccgggttcacgccattctcctgcttcagcctgccaagtagctaggactacaggtgcctgccaccaagcccagctaatttttttgtatttttagtagagacggggtttcaccttgttagccaggatggtctcgatctcctgacctcgtgatccacccgtctcggcctcccaaagtgctgggattacaggtgtgagccaccgtgcccgg

SEQ ID NO: 616 - DNA, 318 bp, Homo sapiens
catttctcatggggagatgtctagaagcagaattgctggggcctggggcaggcgtagaacactggattctaaacaggccggttcttactgtgcctctccgagcatttcacacgcgttcccaccaccttcccaggggacctaccacgtgtctccttcacctccctttattctcccagtaacagaaacttcagatccatcagcctctgttttgcagagcagagcagccctcctgaccttgctcctgtcctggtgggcccagggcacacccgtcacagctaaagggcccactgggttggccaacaaggagagagccctttc

SEQ ID NO: 617 - DNA, 32195 bp, Homo sapiens; identical to SEQ ID NO: 611

SEQ ID NO: 618 - DNA, 239 bp, Homo sapiens; identical to SEQ ID NO: 613

SEQ ID NO: 619 - DNA, 283 bp, Homo sapiens; identical to SEQ ID NO: 614

SEQ ID NO: 620 - DNA, 2956 bp, Homo sapiens
ccaatataattattgaaaatcattaccaacattgaatttggcatgtctttgaaccagaatctgacttgctaacaacttattatccctttcttatagatgaggaattagaggaattatgtcaggtaaggaaacagacagaaaggataactggtttgataagtgtgactgtgagggaaggaaagaggttcagtggtagcaggacaggtaggaatggaaggggctgagagatcactgatcttttgttttcaaaatgagaaacagtatggaccatgaaagcatttgcttctatttacttgcactaatattatggtaatgataggaaaaaaatttttttattccagcaaaaagcattaccatataatttttcaattcccttgaattgggcataaaggtctctcactttgctgggtaatgaataaaaaggaccaaggtcatttgatgatgactcaactgttttcttagcaacattaatttcctcagataggagagtgtctttgagctgtttacttctagaaaatattggtgtctgggccttcgcatttccagtcatggcattttttagatgatctttaatactttttctcctgttcatatctgaactagttctgactttggaagaggactcatcattttgctggggttgctctatgcaattatggggcagttcctcattcacagtgttgtgagaggatgacttccaatccctttctttcatagaatgatcacccaaatcatttgaagagttctgcaaattttcaaagtatatagcctgtgaggaaggtacatcatacaaaagatcagctccaggttcaatagtgacaccttcatatccactctggttctctgtgtgcttatcagtttgtaattcagtaaggttgcctatggtagtaatgctgagtttgtttttgatactttccgagcaaagattttcagtggcaaagtctgtagcatgtttcttatgttcagggagttgcatatatttttgttccaggtcgtcaacttgagctataaaggagttttcagtaaagctatcatagtcaccaaacatgtccacttcactgtcattaggctgcaaagagaacaaaaacgcttatggtcaattccagtttcattaagaataaaagcttcaccagcctggccaacatggtcaaaccccgtgtctacagaaaatacaaaaattagccgggcatagtggcatgctcctgtaatcccagctactcggaggctcaggcaggagaattgcttgaacctgggaagcgcaggttgcggtaagcccagatcgcgccattgcactccaacctgggcaacagagtgggactctgtctcaaaaaaaccaaaacaaacaaacaaacaaaacccccaaaaaacacttcagcctagggctgtaccaagtatataattatatggtcacatatggatcacagtcttatatgtaaatagatatcttacagctgaagaaatggaggcccaaagaggttaaattacttgcctaaacagcaggttcaggagtgttacgatgatactgagattctaatttttgagacagggtctggctctgtcacccaggctggagcacagtggctccagccactgcacgatcacagctcactgcagtcttgacatcctgggctcaagcgatcctcctgcctcagcctcccaagtagctaggactacaggtgcaggccaccacacccggctaattaagaaaaaaaaatttttttttttttttgtagagactgggtctctgttgcctaggctggttttgaacgcgaacttctgggcttaagtgatcctcccatctctgcctcctaaagcactgggattataggcatgagccactgcacacggccagattgtaattcttaaagctgtactaaaacagcaggaagactggtagacgtctactgaaatgtcagcgcattcgaagtttctgataactgcagcgcttccctcccagactacaatctacagtgactggcctctaacagaaacatggttgtaccactagacactccaaggagttcctaggaatttggaattgagactgagaaactgaatactgacttggagtggtctgctacacagaagacacacaaacctggaggcagcaatatagtaaagtgattaagacaacaggatttggagcaagaactgtactatctcaacttttcagggcctgattactgtcgtaaaatctagataatataactagcttaacataacgggtcttcaataaacagcagattttatttgtacagtaggagctgcagttatctggaagcctagatttgtgtctcagtcatgccacttaactgctgcgtgcacaacttttatgtctcggggtttacatttcatatttatatagaaatgtaaataacaaggcaatcaatacctcctaagtgccgattaacagtggtaacgaagacgagagaagtaaacgaaggcgataaaactggtcaactctttgcatctgggaaggatgccaaaagtttgcagtttcaagttccaagtcctccgtacctggtctcccacccctctgtcagtgggcatgtgacgtaggaggtccgggtttgtatcaccacctccaaggacgagacattccggggaatctgagagtagaaggggctgtacctcaaccggcagtacgcccgcggttttccgcctcctgttctcagccaccatttcctcctcctctttcccctcatctccgggcacgagctcggccgcggtgggagcgccaaaaatacaccccaagcttggacggttccttttggggagagacacccgccggcggatgcgggaaccacattcatccatggcaaggacccagggccctattcagacgtcgttctcagtgacccagacgctaagcccatatggaagggagagtgggacgccggagcccgcttctacatccaccttgggaaaagaccccaagttagctctcagggctcgc

SEQ ID NO: 621 - DNA, 688 bp, Homo sapiens
ttcttgtagagtcttttattagactttgtttcctgtagttctgcttctccaacctgattgtcttctctgcaagaacccaagttttcatatcattcataagatcctaacaggagttccagaaaacttacgaagtggaaggttgatggggctgaccctccagtatggcagcaactgtcccttcttggtctaaaatgacacatatctgaaatatatgcaaggaccctggatttttgaaaaacattacaagataccttcttaatattattgcttctttgcacttaaaacaagtttgtccaacccacggccctcatgaggcccagaatggctttgaatgtggcccaacacaaatttgtaaactttcttaaaacattatgagatttttttttttgcaattttttttcttggctcatcagctatcgtgttactgtattttattgtggctcaagacaatactttttccaaagtggcccaaggaagccaaaagattggacatccctgacttaaaacttaattgcagctgtctttaaagatgtctagctttgggaaaggcagcacaaggcagagcatctgggtggtggcagggatgcacccgtggggagaggtagctgcggctgctggtgtggggggaaagatgtttggtttaatcaacagtattactaataactgacttctttcactcaagacatgt

SEQ ID NO: 622 - DNA, 3150 bp, Homo sapiens
agcggaaggggcctttcggaacgatttggaacgaaaggaagtggaagaaacgcggaaccatggccgctgtggttgctgtttgcggtggtctagggaggaagaagttgacacacttggtaacggctgctgtcagccttacacatcccgggactcacacgggtaaagtctccatatcctatgctccattgtagcgctgcaggcattaaccttagtcctaatggttagagtcgtccctgttagcaaaacgactctggtttctaggcgattaagtttctccaagatgggtgggaatctgtaattgcctttgactgttttagtgtcgtctaatccactcctttaaagtatttaaacgtatgaggaagttggagtggttcttaaaaagcagagactttcctaagatctctggataatcttagtgaggaagggacatttccagagtcgcccagcagcaaattccagatgtctaaggtccccaaacagaacaaaattgcataatttttgcaattttatcttctctgtgcttctctataaattctttctgggacgggtctgttactttctttttggtatgacagtgcctttctgttgcttctcctataagaatttgcattaagaattttctctaaccatggaatgaagggaaaataaatgtcagaaagagcaggtatgggcgggaaaatatgttcttttccccctaagccctggaaagcacacccatgttgagtcttactctgtcccaaatataaaagtttttaaccattctgaatataatacaaaacctttctttaatatcgtgtcccttaattcatcctgtctccataaaaacaaaaatctttagctattcagctaagaaaaagaaatggttaattgctgtttctgtttaatcgcagtgctttggagaagaggttgttcacaacaggtatccagcaatgaggacctggtaagaatttttttttctattagtaaggcctttgcaaatatgaccaaaatgtttttctttttaaaacgagatctggtattagactctaacatcttttattttagctacttgaatagagttctgccgtaggacaaaacaatttgataattactctgagttcagaaatgatgatgaattgattgtagtcatgtagtcagctgagttttgaagtaggggaattcctagattagaagcaaagctgctataataccatatttttcttcctagatcttaaatttaaggatatgtgatttgggaattgttttttttttttttacatagccctttgtaagcaaatgatatgggaattttaaaaggtagtttgggtgagcagaattttagataactgaaaagagactgtacaaagcttagctataggttggctatagtattaacatggactttctgaaagcacaggttcttgctacatgcaaaggtattttgacactaattagaccatacaaagcacttggcacagagctgaagagtagttacgtgagctgaatgtaaattggaaagtttgaggaattggaaaaaacaaaagaacttgtctagtttctctgagcatctgtcttggtaatctaatccatgcaccatactttaagaaagtaaagggacattatttcttttttagttcataaatcccactttgtctctaatcaaagttatggaccctctccacagaaaaaggcacacagtcccattcatttgaagttttgcatacgattacagggagtcatgggcttcaaagccatttctagattaagaacctctatcctggagacagccatactgactgtaggaaggaggcactgtgacaaaagcattagaggcagtggtggtaacagaaaagccaaaaagactgatacaaacttatatagtagcctggggtgataaagtcaaagaaccttttattacagtaagtcatgggccattatctgtgtataaaaatagtgataaaatacttgatagagacatggggatggataaattagggattgtactcatttaagaatggcatatgttatctattgtgttgtaagtttccttaaatctaaaaattttttcattatctacaatctgagcaaagcattggaacactttcttatcagacatcatttttgttctgccataaaattttattctatgaagattgtactttattccagaatcttcccatgcgttaatccgtaggctaaactaaaacaaaataaagtgcttatacaaaatatgtacacagtaagaaaggtataactaatcctttgaatggatttgaatgtagaatagtaaccttttaaaattcagaattaacacatcctattatcagacttttcgtttttttccctagcccatttcaatggaaaatccttataaagaacctcttaagaaatgtatcttgtgtggaaagcatgtagattataagaatgtacaggtgagatctggttttacttcactatattttagggttttgcttctgatagatctgcttaaagagaatcaagtcagtttatagcaggcttttgtagaggtaactgttttagcaacttcataatttcaaatttggttataattctatgtataagcttatctctgctttattcaagtaaaagcaccttggctttcccccacttactgttatttccactctgtttttttcactaccccaaacatcttaatagctccctgtggcagtaattctcaattggtgagggtcagaactttggaaaaagctcatctggtgaagctgatctctttatctcaccacccatatcactgattcacatattacttatctcttgtctaactctcagcaagttagaagttgcaaatttggggcaagtgaatagcgctagaattctgtatgttggctgggtgtggtggctcacgcctgtaatcccagcactttgggaggccaaggcgggcggatcacctgaggtcaggagtttgagaccagcctggccaatgtggtgaaaccccgtctctattaaaaatacaaaaattagctgagtgtggtggtgcatgcctgtaatcccagctacttgggaggctgaggcaggagatttgcttgaacccaggaggcggaagttgcagtgagctgagatcgtgccattgcactccagcctgggtgacaagagtaaaactctgtccaaaaaaaaaaaaaaaaaaaaaaa

SEQ ID NO: 623 - DNA, 4079 bp, Homo sapiens
tgaggccactgggcttgggcaaccacttcacttatgtgaaactcagtcaaggctctctcccacggttttgaaggtctgaaagaaagtgatgcacacacagagaaaaaacaccaactccctgatctctctcctacacccacctgaataccaaggataaagaggtacttgaggcccagctgcagcagtgctgcatagaagtgctgaggcgcatcccggagccgcatctccatcagtggctcctcttcctcctcgggtctgactctggcatcagcttcattccctgggggctgctgtatcttccgcagcccttgactctcacacaggaaaggccagagcaggagcagtgggcaacctactgcctcaagagagggtatggctggaatcaacaggccaccctggctggctcaggttccaattagcctaggccaaggggtgccaaagatccaacaaacccatatctctccattcaaatccaggggtttcctttctttccacaaagccagagtaaacaatggaagcaagtgaaggaggagggggtacctgcaaagaggaggtgggaggcaaaggtgttggctcccactagcaaagcaggcagccaagtacaggagccatgaccctctgggaatcccacgaaggctgcatgccaatggatggctggaaagacaggctggtggcctgtggagtagaaggtctgtgtggccatgagggcccaagccgagactgcctgccatggcacagtaaaaggacctggaagaaaagatatgccacgttacagtcacttcttattccctaatccataggctactgctccacaatcatatactcctactacttcagtatcaattctcatacacactcaaatgcctatcagcccaacctccttacagtcaacattctgttattctaattctctctgtggtacaaaagcgccatcaggcttatctgaatcctgctatggccaatctctttctttctctcaaacacatacagctcagtgccattatatattcacaatttactacttccatcactggaaaatcaagaaatgtgctcatgaggatgcagcatttccacagggagtcttagaggactccttgtctctcctctccatgaaccctgggaaccaacaggagggatcaatttgcttggctatggcaggtaagagagaggacaccaagaagaccttcctagttgtgtggggcatgggaccctctgtcaagctcaggaacatgaggagcaacacctccttgaaaacaagaggggccgaactcacatcactattgtctttaagtgaatcagagctgagatatttaccaggggtggtgacgggtatcccagcagcaagcagatgtaggagaaggaagctctgcagaaacagaagcaggaacacaaggctgatgcgctccgcatgcaacagcagaagtgggaaggccaacagggtgagggctgtgaccatagcagctgagtagacactccccaactgataagcagccacagtcaggggaccctgagatttggtcctctctaaccggccccggaactcctcctgcatgtgtcggtagatttgagggaccacataatccaagtcagcttgagaagtgggggggcctgagaagggagtgaggacagtcctggtccttggagcgcctgccccagccttcaccagcactgtcacaggcttccagagcagcagcgcgagccctgaagcagccagccctgctacagcccgaggcagcaccatggatgccccagagaccaggacccggagacgggggggagcctcatctgcccccgacgccaatgcccagtaggcagcagtacccaatgccattaggggcagtccccagcgcacaaagagcatgggtggctcggggctcttgagattaccatagcggcgaagccacaagcgcacggcagctaacagggccaccagcgccgccacacaagctccataccacaaattcttggctcgaccacccaccatggatgccagaggactcagccagggagaggagtggcaaacaggtgtctcttcagggcaacgatgaaaaagcccagctagccttgtacataaaagcaacccaattccaagcctcagggcatatgcaccattgtgccgtggggggtttgttgtggctgaagtgccaaggcggggcattgtgagtagcttaggtggaagcagctggccctcccagtgaagctggacaaccaggagcaggatgaatgagcccaaaaggaagggggtggccctggcctcagctacaacaaaactatcagagaagaacacagccaagcgaaacagcaggagtaacaggacgggcccagggatgggaaacagggttgccaggggcctcttggacccccagccagcccaggctttccacagaaaagggaggaatgagctcactgcagccacagcccctagaagcactagatctagcttcagctcaatagttcccaggagtccagcatacgctatggccccaaccaggccccaggccacaggtgtcaggagtagagggcagaatggaaagcctggggatattgcccactgagatgccagcaggcagataaagcaggaagcagccaagagagcagtaccccccgccatgcggaccagagagaaacgagcccaagactcgatgcacatggcccgagctccccgcaggaactgctgcagctcagcaatcacagtcggcagtgtcgcctcagcccccttggggctctggagaagccactggtagtcagcagaggccttggagaagaggttctgcagctgatgaagctccttagcttgaaggtcctgagtagcagctgagtaggtatgaagaaatcgggacacctggcagagaaaaggtcagaggccaaggggaacaggtcagagacataaattggggcagaggcaagaataggtattacaaaagggggtacctggaagtcaaggacccaaactctgtccagaatcggggaagggagggataacggaagagggataggtatggaaggtgggactaagactagtcaaaggacaaaagagtggttcattatgcttctttcatgcccaccctagctctgtcacctggaaacccagcccgcttacctacctgctgagcattgagatggagagctgaggcttgggctaaagcagaggagtggggctgggagtcctcaccccctgagaatagctcagccatcacttccccgatattcccaaatgggatgggcaggcccagcagcagggccagcgtgggcacaaggctaacttgaggaatcacctctggctcctaaaggaaaatgacagtggtcaacagattcatcacaaagctgaagtcaatgtttgggatggcagacataggggcctaggtaagaaatgagagtggaggatacccaggatcatggatttgggggcctaaaatagaggtattcatgaggatgctgtaatggtaacatgggctgattactgggagaacagatgaggaacatcccaggcctcacctctggtggggtgctggggaagactgctgtggggctatacagaaagagagcagctgagacctccagctcactgtcccctccatggtctccatttgtggtcatcccatggtccccagccactaccagcagtgtgtcattctccagacgctccacaagtccctgggggccaataaatgtgtcaggagtagaaacggataaatatttttctcaaaaagaaaaaagatttttcttcaggggcctattcatccccagctataactccattagtaaggcctagacctttggcaaagagacatgtcttcggccatgatcctgatgcccaaagctacacattgagttaatcaagatggatggagcctctagcttcagcagaaggcctagagaagacagaattcagccaggaaagaagctctaagataagagcttcttcgagattctcagacacaaacccactcccccagccaataccccacactcactggatcacctggtccatctggctaagtttcttggccatttcagggtggtgagggccatgcttgtggccacagtggtccacacccaggaagtgagcaatcagcacg

SEQ ID NO: 624 - DNA, 7369 bp, Homo sapiens
tgcctggtggcaggagagactgatcctcctcacaacccctatagaacagtggggctcccccacatctcagacacacataattatattatcattttattacacttttttttaaatagtagagacggggtcttgttatgttccacaggctggtcttgaactcctgggaccaagcaatcctcccacctctgcctcccaaagtgctgggattataggtgcaagtcaccacgcccggcctattttattccacttcggagaccgccccccttgtccctcagatgcatccaaatcaggagttagggatcatactccactgtggtcctgaattatagaataatgaagtcctagatgtcagcggcccctggctgcatgatagtaagagtatggctgagcctgtcttgcagatcatccagtacctgtacaggccaggctacactgttctccagcactctctgtagccaagtgccagtaatcacagactaggctacctctgctgggccagaaatagctgcctgaaccaggagctcacagcaccatccactctcatcaccaaagctatgcccaggagaagtcccacgctgctcacaatgaagcccacagcctcaaatatgaacctgcaaagaaaggcggagaatctcaggcaacagagtaggtctactgccttttccctgtagaggcaaaaccttggccatcctggatgtttaggatcttcatactttgttccaagtttctccctccccaccacctctacttctcaagcaaatctactcacttaggggcaaacactttccagaccatgagatgcctgcgaaggatggaggctgccaaggcacaggccagaatctagaggaggagaggaggggccacgttacttgtgaaggagaggaggaagcggagcaaaaggagagtttctataggcccctgtaaaaaatggaagcaggagaatagtgcatgtcagtggaaaaaatattgcatgtcctgggctaggagttaggagacctacttcctgccctgccccaagcactgactcactatgtgactttgggcaagtcagtatccatctgcaatgctaacactcaggctgtgcccccaggatggaggaagatatcagtgccacatctgcctctggaggaaaggaagaggatccatgaccacagtttgggaagaaaatcctggctatcacctcagtttttccagtctgtccactgatagagtaatcctcaaatgcaactagcggggtccagatctaggttgtagaggggaaatgatccaggactaggattaaggagacccaggttcaagtctcagaactgccatttgaggccactgggcttgggcaaccacttcacttatgtgaaactcagtcaaggctctctcccacggttttgaaggtctgaaagaaagtgatgcacacacagagaaaaaacaccaactccctgatctctctcctacacccacctgaataccaaggataaagaggtacttgaggcccagctgcagcagtgctgcatagaagtgctgaggcgcatcccggagccgcatctccatcagtggctcctcttcctcctcgggtctgactctggcatcagcttcattccctgggggctgctgtctcttccgcagcccttgactctcacacaggaaaggccagagcaggagcagtgggcaacctactgcctcaagagagggtatggctggaatcaacaggccaccctggctggctcaggttccaattagcctaggccaaggggtgccaaagatccaacaaacccatatctctccattcaaatccaggggtttcctttctttccacaaagccagagtaaacaatggaagcaagtgaaggaggagggggtacctgcaaagaggaggtgggaggcaaaggtgttggctcccactagcaaagcaggcagccaagtacaggagccatgaccctctgggaatcccacgaaggctgcatgccaatggatggctggaaagacaggctggtggcctgtggagtagaaggtctgtgtggccatgagggcccaagccgagactgcctgccatggcacagtaaaaggacctggaagaaaagatatgccacgttacagtcacttcttattccctaatccataggctactgctccacaatcatatactcctactacttcagtatcaattctcatacacactcacatgcctatcagcccaacctccttacagtcaacattctgttattctaattctctctgtggtacaaaagcgccatcaggcttatctgaatcctgctatggccaatctctttctttctctcaaacacatacagctcagtgccattatatattcacaatttactacttccatcactggaaaatcaagaaatgtgctcatgaggatgcagcatttccacagggagtcttagaggactccttgtctctcctctccatgaaccctgggaaccaacaggagggatcaatttgcttggctatggcaggtaagagagaggacaccaagaagaccttcctagttgtgtggggcatgggaccctctgtcaagctcaggaacatgaggagcaacacctccttgaaaacaagaggggccgaactcacatcactattgtctttaagtgaatcagagctgagatatttaccaggggtggtgacgggtatcccagcagcaagcagatgtaggagaaggaagctctgcagaaacagaagcaggaacacaaggctgatgcgctccgcatgcaacagcagaagtgggaaggccaacagggtgagggctgtgaccatagcagctgagtagacactccccaactgataagcagccacagtcaggggaccctgagatttggtcctctctaaccggccccggaactcctcctgcatgtgtcggtagatttgagggaccacataatccaagtcagcttgagaagtgggggggcctgagaagggagtgaggacagtcctggtccttggagcgcctgccccagccttcaccagcactgtcacaggcttccagagcagcagcgcgagccctgaagcagccagccctgctacagcccgaggcagcaccatggatgccccagagaccaggacccggagacgggggggagcctcatctgcccccgacgccaatgcccagtaggcagcagtacccaatgccattaggggcagtccccagcgcacaaagagcatgggtggctcggggctcttgagattaccatagcggcgaagccacaagcgcacggcagctaacagggccaccagcgccgccacacaagctccataccacaaattcttggctcgaccacccaccatggatgccagaggactcagccagggagaggagtggcaaacaggtgtctcttcagggcaacgatgaaaaagcccagctagccttgtacataaaagcaacccaattccaagcctcagggcatatgcaccattgtgccgtggggggtttgttgtggctgaagtgccaaggcggggcattgtgagtagcttaggtggaagcagctggccctcccagtgaagctggacaaccaggagcaggatgaatgagcccaaaaggaagggggtggccctggcctcagctacaacaaaactatcagagaagaacacagccaagcgaaacagcaggagtaacaggacgggcccagggatgggaaacagggttgccaggggcctcttggacccccagccagcccaggctttccacagaaaagggaggaatgagctcactgcagccacagcccctagaagcactagatctagcttcagctcaatagttcccaggagtccagcatacgctatggccccaaccaggccccaggccacaggtgtcaggagtagagggcagaatggaaagcctggggatattgcccactgagatgccagcaggcagataaagcaggaagcagccaagagagcagtaccccccgccatgcggaccagagagaaacgagcccaagactcgatgcacatggcccgagctccccgcaggaactgctgcagctcagcaatcacagtcggcagtgtcgcctcagcccccttggggctctggagaagccactggtagtcagcagaggccttggagaagaggttctgcagctgatgaagctccttagcttgaaggtcctgagtagcagctgagtaggtatgaagaaatcgggacacctggcagagaaaaggtcagaggccaaggggaacaggtcagagacataaattggggcagaggcaagaataggtattacaaaagggggtacctggaagtcaaggacccaaactctgtccagaatcggggaagggagggataacggaagagggataggtatggaaggtgggactaagactagtcaaaggacaaaagagtggttcattatgcttctttcatgcccaccctagctctgtcacctggaaacccagcccgctcacctacctgctgagcattgagatggagagctgaggcttgggctaaagcagaggagtggggctgggagtcctcaccccctgagaatagctcagccatcacttccccgatattcccaaatgggatgggcaggcccagcagcagggccagcgtgggcacaaggctaacttgaggaatcacctctggctcctaaaggaaaatgacagtggtcaacagattcatcacaaagctgaagtcaatgtttgggatggcagacataggggcctaggtaagaaatgagagtggaggatacccaggatcatggatttgggggcctaaaatagaggtattcatgaggatgctgtaatggtaacatgggctgattactgggagaacagatgaggaacatcccaggcctcacctctggtggggtgctggggaagactgctgtggggctatacagaaagagagcagctgagacctccagctcactgtcccctccatggtctccatttgtggtcatcccatggtccccagccactaccagcagtgtgtcattctccagacgctccacaagtcccctgggggccaataaatgtgtcaggagtagaaacggataaatatttttctcaaaaagaaaaaagatttttctccaggggcctattcatccccagctataactccattagtaaggcctagacctttggcaaagagacatgtcttcggccatgatcctgatgcccaaagctacacattgagttaatcaagatggatggagcctctagcttcagcagaaggcctagagaagacagaattcagccaggaaagaagctctaagataagagcttcttcgagattctcagacacaaacccactcccccagccaataccccacactcactggatcacctggtccatctggctaagtttcttggccatttcagggtggtgagggccatgcttgtggccacagtggtccacacccaggaagtgagcaatcagcacgtcccattcaccactgtccactgtgaaggggagaacactgagcacagaagactaagacccactcctcaaccccagccaggctttgacactcctctatgtccagggatacaagcccaggctgttacacccataggtggctcagaatttgtggactaaagcagttctccccagctcccagtcttagaactaagtgctctggccccatgctcactggtggggtagaggtgttccaggatgccattgtccactgtgtctaggtctctgacattgaaggatgggaagaagaaagctttggagaaagcaccagggaaaaggtctttccaggtatcatctcccatgaagactacacgccttcctgcagggacatgaaagagaagtcagagcctgagcaaacgtcagggttaggagaaaagaggaaaagaggccctttaaagacccatcagaagtcccaaccatgcaacctaaagtacagcaattccatacagcaatccttatccttcagggcctaacattttccaccaggaagctttccctgataaccgtactccacccagacctcacacttatccttcctacaaaatgctctcctagttctgtctctgggtatctctactgagttgtttttcctgggtgtatcctgcttcttcccagtcagtgaatgaacagggcctgtatttctctgctttcttctccacacttgcaagccaagatccacatcttctcttcttcccttctcccttttactgagaggtctccaagaataaaacttacactccattcagattagaagcttcataggaacaaagcccagatcccttctcctctgtctcccaaactgagctccctaccagcagggccctggcctctttcttctcctctgtcccccaaactgagctccctaccagcagggccctggcctctttcttctcctctgtccccctacaccataatcaagtgtgcatctgggcacccaaaggtctgactccctgacttcaaattttgaagaaatttgccaaggtacttctggccttcaaagtggcccacactgacctgcactggtgagctgcttaatgagattgtcttccactatggcgtggctggcgaagttactaccagcatcaataaaggtaggcagtgagccagtggtgagggccttgaggcgctgcatggtggtggtaggagggtcaacctgagatcggtagagccgggcatggtggggctgaatctccaggatcctctgcaaggagcttagtttgcccaggaagggtagggagacaggaggctctctaggcacgtgtgaatgctggggctgggcgaagtcaaatcgcagagcatctatcagcaccaacacaacccgcgaaaatcgggaagccatccagcaggccccaggtttcccttggctcccccatggcagggacccagggcctgggggctcttggcagctgctatggttggtgagctccaaacgggtgagcaggaagccactggtgaagagggcaatgccagcgtagaagaggaagcagacccaggccaggaagagcaacactgaggctttctgcatcctgataggggtggggaagtaaattcattactgtggggcaaagaaccagtggatattctggtccctgaatacaagcccagctagaatcacttcctcccggaaaccttcctggagataaaccatttcacagccaacccctcgcaatattactctcctcctatttccaggctgggcatggtggctcacgcctgtaatcccagcactttgggaggccgaggcgggcggatcacctgaggtgaggagttcgagaccagcctggccaaaatggcgaaaccccgtccctactaaaaatacaaaaatgggtggcgggcacctgtagtctcagctactggggaggctgacgcaggagaatcgcttgaatcggggaggcggaggttgcagtgagccgagattgaaccactgcactagagtctg

SEQ ID NO: 625 - DNA, 4166 bp, Homo sapiens
ggcattttgcaataatttatttcatatgacaccaaaagcataagcaatgaaagaaaaaaacaggatgaactggactttctcaaaattaagaatttttgtgtaggccaggcgcggtggctcatgcctgtaatcccagcactttgggaggccaaggcgggcggatcataaggtcaagagattgagaccatcctgtccaacatggtgaaaccccgtctctactaaaaatacaaaaattagctgggcgtggtgatgcacgcctgtagtcccagctactcaggaggctgaggcaggagaatcacttgaacccaggaggcggaggttgcagtgagcccagatagtgccactgtactccagcctggcgacagagcaagactccgtctcaaaaaaaaaaaaaaaaaaaaaagaatgtttgtgcattaaaggatattatcaagaaaatgaaaagacaacccacagagtggagaaaatatttgtaagtcatatatcatttgtaaatcatatatcatatcatatcatatatctgttcagggacctgtatctagcatgtaaaaagaatgctagccaggcacagtggcttacacctgtaatcccagcactttgggaggctgaagcaggaggattgcctgagcccaggagttcaagaccagcctaggcaacatagtggggccctgtctctacaataaaataaaaaattagtcggccatggtggtgcacacctgtagtcccagttactcaggaagctgagacaggaggactgcttgaacccaggaagctgtggcttcagtgagccatgatcacgccactgcattatagcctgggtgacagagcaagaccctggtccaaaaataataataataacaataatccaattaaaaatagtcgaagaatctgaagggacatttctccagtaagcacaagaaaagatgctcagctcagcatcattaatcattaaggaaatgcacaccaaaaccacaatgagatattacttcacacccactaggatggttagaatcaaagacagatgacaacaagtgttgacatggatgtggagaaatcgttacccatatatacttctggtaagactgtaaaacgatacagcaactttggaaaacaaactggcagttccttaaaagattaaacagagttaccttatgacccagcagttgctcagtgtacagctaggtatacactcaagagaaattaaaacatatgtccaaacaaaaacttatacacaaatgtttatagcagcattacataataaccaaaatgtgtaaatccaaatggctatcaatggatgaatggataaacaaaatgtggtatatccatgcaatagagtattatttggccataaagaggaatgaagtaccaatacatgctacaacatagatgaactctgaaaacattaggctgagtaaaggaagataagacagaaaaaggcactactgtatgagcccatttatatgaaatgtccagaacaggcaaatctatagagacagaaaacaaattagtggtaccaggagttaagggggagaagagaaggaatgactgcttaagggtacagggtttctttttggggtaatgaaaacattctggaattgataatgatgataattgtacaacgttgtgaatgtactaacggccactaaattatacactttaaaatggtgaattttatatgaattttacttcaattttaaaaaagaaaaagaatgaagtactgctgtgtgctgctatatagatgaaaccggaaaacattatactaactggaagatgccagtcacaaaagaccacatattattatgatcccatttctgtgaaatatccaaaatgggcaaatatatagagaaacagcagattagtgctagccaggggttggggaggattggagggtgatatctaaacagtagattttcttttggggttggtgaaaatgttctaaaattgattctggtgatggttgtacaattctgtaaatacacaaaaaccattaaatcttacaccttacgtgggtaaattttatggtaaattgcatttcaataaagcttttttaaaaaagaatcagggctgggtgcaatggctcacacctgcaatcccaacacttgaggaggtcgaggcaggaggatggcttgaggccaggagttcaagaccagcctaggcaagacagcaagacccccacctctacaaaaaattaaaggaaaaaaaaaaagaatcattgagttagtgtggaatggactctgatttcaaggaaaagggagggataagataatttttctttttaaaagagagaggatctatgttgcccaggctggagtgcagtggctattcacaggtgcattcattgtgcactacagcctctaactcctgggctcaagtgatccacctcagcctctacatagctgggaccatgcctggctaatttttttatttttgtagagacggagtcttgctatcctcaagtgatcctcccacctctgcctcccaagtagctgggactatagggacatgccacagtgcctggctagaaataatttttaatagcgtaaatcaatgtactaatgtctttatctaatagaatcttatagatacaccaggagaaagaatagacagtggttggcagatcagcaaattagccttaggctccaggcaaggaggctactgcaaaaagtgcagggtacctggctgagaagtggaggaactagggcctaaaatccttccatgggtgctagggatggaggaaaggtttttgttttggtttttttcccctttctcaaaaagacaccatttgctcaccgaactatgcttgggagttgtgtccaccagacttggggagaagcgtttttctaattcatcttacaggccagctggggccaacttcacccccttgcattattaaacctctttctaccatggttaacaacctatcccttttttttttttttttttttttgagagagagtctggctctgtctcccaggctggagtgcagtagcgtgatcttggctcactgtaacctctgcctcccaggttcaagcgattctcctgcctcagcctcctgagtagccggaattacaggtgcacaccaccacacctggctaatttttgtatttttagtagagatggggttttgccatgttggccaggctggtctcaaactcctgacctcaggtgatccacccgccttggctccccaaagtgctgagattacaggcatgaggcaccacacccagctgaaccatacttttcatcatcttactatttggcatctgtaacactagggaccactggccattaataatctgaacttagccaggtgctgtggctcacacctgtaatcctagtgctttgagaggccaaggtggaaggatcgcttgaggccaggagttcacgaacagcctgggcaatgtagcaagactctgtctgtacagaaatttaaaaattagccaggcatggtcccagatactgaggaggctgagatggatcacttgagcccaggagtttgaaactacagggagctatgattgcaccactgccctccagcctggacaatagagcaaaaatatgtctttaaaatgatagtaacaataaaaataatttcaattcttcccttagctacctaccacagcagtgaacgtttatacttcacaaccactactactcagcttctctactttatgccagctaaaagtaggtgctatcccatggttttaacatctgttctgtttttcagtggtatcagctcctcttgttctaggtactgtcaaacctcaaatcccagtcctgatgcttctctccagggcctcttcccaactcttttgatggacatctctaggaggatttcatgccagcatttcaaacatgacaggagtgctggggtgaacggagggcacaaaacatacacatgagaaaagaaccagtggattcacacaattttggcttcaagtcaggaataatgaatgggacaaggtggaatgctacataagatgggcatgtagatctgataaagagtggcacaggttgggaaacaagggaggcttccacagaagggaagggcaaagggtgttctatagtgaaaaggcccagtggagcgggggcatagcactatttggggcttcagacagttaaagtcggtgctgcatgatgcctgggcttgtcttctcagtcttctc

SEQ ID NO: 626 - DNA, 1768 bp, Homo sapiens
cctccgctgggacccaggcgtgcgaccggctctgcctcctccggtaactacccagcctcccgctgggcaccctagccgcggtactgagcaccttggttaggagctgaggggaagagggagactcccttacttcagggtgaggggaataccggggggtgaggttctcgggagaccctggctcacctgcaatggcacccggaagtgcggcggcggcggcgcctgcgacctggcagcacagagatgcgtgcgccagacagagtggcccgtcggtggctccatcgccatctgccggcacctcggtggaagtttggccaggagcgtggggctggccccagtttgatgggatatttagtaattgaaaattggggacaggggaccaagctggaggaagagttcagggaaccactgtccattcatggttacgactaagagcacggctgctggagtcaaacttgacttgaatcctagcttggccgcacatattgtcatcattaggcattacctcatctgtaaaatggagataatacttattttcccttttttgcttagctgagtccaactgagatttcattactcctcctttcaaagcctgtaactaaatcttacgactgaataattaagcaaataatccttcggagtggaggaggggaggctgggcccagtggttcacacctgtaatcccagcactttgggaggtcaaggcaggtggatcacctaaggtcaggagttcaagaccagcccggccaatatgacgaaacgccgtctctactgaaaatacaaaagttacccgggagtggtggcgggcgcctgtgatcccagatacctgggaggctgaggcaggagaatcactcgaacccaggaggcggaggttgcagtgagccgagattgcaccactgcactccagcctgggcaacagagcaagactccctctcaaaaaaaaaaaaaaaaaatgccaggcacgatgactcacacctgtaagcccagcactttgggaggctgaggctggagaatcagttgaagtcaggaattggagaccagcctggccaacatgctgaaaccccaactctactaaaaattacaaaatttagccaggcgtggcgatgtgtacctgtagtcccagctactgaggaggctgagactggagaattgcttgaagccaggaggcagaggctacagtgagctgagatcgtgctactgcactccagcctaggcgacagagcgagactctgtctcaaaaagaaacaaaacccgtccactggtttctcatctcagagtaaaagttcttgcattggctctacatggccctgcacactatctgcctcttccccttctgattcatctagctgccacttctttgcttccctaactctgttccatccacagcagttctgcctcaggacctttgcatttgccatctcctctgtcagcttcagttcccgatgccgaaatggatctccatcaccttcatattgaagctcaactgtaacatcagcaaggcttcctgcaatcccctactttactagttcagcacctcccaccaccacaccccctggaaaaatttcccctcacttccttaatttcttccatagcacaactcatcagcatctgaaattctacacgtatttatggtttataccctccgagtagaatgtgagctcattgaggtcagggaattctgttttcttcattatgatatcctcagcacctagcatatatttgaggttcacatactgaccaaacgaataaaggaatatgttaatttttaaaa

SEQ ID NO: 627 - DNA, 5957 bp, Homo sapiens
tattgaagaagacagaagaaaattttttcaagaattgattctcaatcaggcatcaatggctccaccacgaaggaaacatgctggtaaagtttgtaaagcctttaggaaaatgggagggatggagttaagaaataccctttcttggagtcagtttattttagccctttcttcttggaagtgaggacagtttgtcaggttctgtttatctttagatgacgtgtggaagtgtccattgtgttcacctgacttgagattgggaagtatagccttgttaaagctttgctaaacaggacttcttcttatgacttcaaccacatcctgtggtagatgtcacattatggggctcaaaaagtcatagaaaaaagtcttcagttctcctctgttttagtcacagtaagtacccaggagttgaactggcaggttgtgaacaccaggtgttgtgctcattactttttgggccatgatagatttgatgggctaatagctgcttagaacatttgccatttctagtttatttattgattgacttttcaaatacttatttaggaccccttacatttaacgttgtattctagccatttgaaaatctatcctgcctttgttttaagtgttagatttttcttgggtttggactcaataattttggactcaagaattgagcttaagaggtacctcaagaatttctcagatttcagttccttgacatagtaagggctgcattctaagtcattcaaaagagattttcttttcctaatcttaaagatgtgtaaaggataagatctacctgcttaatctttcagcctcttctaggaagtagcaatcctgtttggtaaaaatttttaagcctctttacccttgttccatcttttatgtttcttagagcccttcttgtaggatactcaatacatttcccatccctgccaagtccttatttttccatattctttttactttgtttgtttttcattggttatattatgtaacattttaataattttattgttctttagtggctcctttccaaattttattggtgttttaaaaatgaacccctgtcaaattgctgtagttatggttttttccctcccaaaaccttgggaaattgaatatgtaaattataccttatttatgtttattttgttgcttcctgttaatctaaatatttcattatgaaaatgatttatttcaatctttcatgcttctagatatattttaatctcatagatctgaattttctatgtttacgattgatataattctttttcagttgcttctgttgactttcacttttcatcttaggagctatttaaaaatcagtgaaaaattcttagaattttaattctgagctgtagtgtgatatcaggggaaatcttttaaaattagagaacgttgtaattaggaaagttaatactttaccttttaagaagattttttgtttttcttaggatagatagtgagtaccatggattttacatatgacacttaggactggttttccatctccttcatgactgtggaattctttttttagttcctttttttttttttccctcccttcctgcaggtgccattcactatccgtactctgttgtactcagaatacgagggcaggagacctgcctaaaatcagaattcttttggggataggaaggttcaaatattacttgcccattatactttttatgcatttaaggtaataccattttaagaagcagtttttaaacaaggttgacttaagaaaatcagtgtgtaatactttactgggagatatttgtgttgaactatttctcgtaagttatatataaataatatttcaaaatcaaattattttgttttttaaaggggtcctgttgtgagttattttataaagtgaagctattccctttttgtttctgtgcaaatttttacttgctggatttgcatgtttcacacatatagtcatgcgctgcataatgacgttttggtcaacgatggactgcatatacgatggtggcctcataaaagtataatactgtatttttactataccttttctatgttcagatacagaaatacgactgtgctacagttgcctacagtattcagtatagtcacatgctgtccaggtttgtagcctaggagcaataagctttaccatatagcctaggtatgtcataggctataccatctaggtttgtgcaggtatactcttatgatgttcacacaatgacaaaattgcctaactgcacatttcttagaatgtatccctgttgttaagcaacacatgactgtatttgtaattcttttctttaaagaacattttgagagaatgccaaaaaagggtcctggcccacgacgttggaatcttaacattttcttctgttttctctagctctttgtgctatggaagtgcttcctcttgcactaccttctccacctcgtcaattatcagaatcagaaaaaagtcgaatggaggaccaggaggaaaatactttaagagagttgcggttgtttctcagggatgtaaccaagaggctggccacagataaacgctttaacatcttcagcaaaccggtggatattgaagaggtcttgtttcagtagtgtgcaaacagtgaagttgaactggctaaaagaaaaaaatattgacatctttttttggaaggaaaaaaaagcaaaggcatggatgaatattacccctagcctataaaattttaatccatgtgataactaccgatgtcatcagcaaacatctggtgacttttggatgaaattagcgaccaatttatattggcctcttaattattattaacctttgtggtctcttactcttcgatttaagaggattaaaggttgccttagtcaaatatccatactagattatttttattccaggataaattctgctgtcaaagagtatattggtattaaccaatcaataccagttaatactggcatttcccaaattatgtatacctcatcaaaagaggtagctaaaaacctgaaatttctttgtctttcatattttggaaatgcctgtggctgggatgctgtttgaagttaaaacatatcccgtgcaactaaattatttttctttctaaggattttctctgctcccagtggaaaatttctcactttatatgtgtattattttgtgtgcttgtgggagcatggtttgtgatgatgagaaaagaaattttccatttgggaatctaatactatcaactacatttttggtttttgttttatcctgggataatgtagtgtgtggatgaacacaatgtaatctttactggcctctttcttatagttcagactccatgtttgaacagctttggtgtttttagtttttattcatttctttttttaaaaaaatgaattatgggtgattcagggtttaatgttgtatcctaattgtgaaatctgtgcttttggacctgagcagatacctttgaaaccattacctcatctgttactaggaagaatgagctagcatttacattcctcccccctggcaagtctgaaaagaaatactttcccccctttttggaatgaagagactatctataattttatttgtacctttatccacaatacactgttttttccatttgatcctcttatcaaccttgtaggatcattattattattcttactttgcagttgaggaaacagacttgttggcaagtgacatagccaagacttgaaagttttttaaaattcaaagcccacattcattatcatagctactttatatctttccactgggataacaggacatgcctaattggctttttaaattaataaatatcagtttatattgctgggtcatccccccccccatagtgtttttaaataattttaaaactatcagccgattaaaaaattattttaaataaatgtgatatgtgtgtgtgccctttcttccactcccctatttggtatatttggactctaacacttcttaaaggataggggcttgcccccaactcaacttcccatgctgagagtaaaccaattttgcttttgctcaggaaaactcttttctttctaatcaaagaagatttgtcagattttcaaatgccatctgtaatagttttataaatgacggtaaggggatagaaaatgttggtcagataaatattttatttagggttgtatttctcttcttttctcctttatctttcttcttaggttcgttctgctcttaagctgagaacataggagtctctgggaaggatagagaggggaaaacaagataacctaaaacaaaagtttttatttaactaatgaatttaaaatgtctgaaaactttatcaaattccaaagcagactgcagagaaagcaaaactttagaaaataaatgttaaatttaaaattaagcatagagtggtaacatttatagtctttaataatatacattttatagtgctttttagtttataaaacagtttccacttatacacaggcatttatgtcaaataccagaagcaggaatccagctaatatcttctgaggtagtttgtttcagtataactctgctacctcccttatagggagattgactggtttttcagttcctaaaaggtgaaaaataaagcacacatacacttctacttaatattttttataagtaatcctaaacattaaaaaacatataaattacatatatgtgcgtgtgtgtgtgaatgtgtaaatttaaaaataatggtatcgatgccatctgaaacttcatagagcagaacttaaccatctccccagaaatctttcctggactaattttagacattactgctaagactgctgttatagcaaacctatttacttgatttgagatttgcattggggaaggcagtagatacataagttgctaacactttcttgttggtcagggatactcaatttattgggcaaatcatgacgtaatatctcctgtttagggttatctcacagaaaatcagcacagaaagcagcatgtttgtttgtttgtagatttctttatacttagggacaaatccagcagatctcgtactggttaggaaaactatacttaattttcttatataattgactctaaatgtttgtgatgactccaaaggagtggaaaatactttccatgaaatagttcactctagaaaactgaaaaagaaaatttttgttgaaaatttaaagagatttatcagaataacttatctcatagtatgaaaagtctttgctttttattttccttaatttttttcctgaagtcatatttattgatgctcattgggaacttttgcccatacattatcttcccggatatgcccgaaggattaaaaaaaaaaaaaaaaagctgacatggtttcaaattttaagaacagaaacatttcagagttgatttaggtatgacttggaaactgaagctttcatggaaagtatgacagatagtaactttggtagcataaatagcgctgcaattttatctttataaattatttatttgatatttagatttaatttttaaagaactttgtttttattttgtgtttttatgaactgagatgatgtgaaaaactggaagtaatttttattaaaatatctgttttaggtttcagattatcttgaagtaatcaaggaaccaatggacttatcaacagtaataactaaaattgataaacataattacctgactgcaaaggatttcctgaaagatattgacctcatctgtagcaatgctttagagtataatccagataaggacccaggaggtaaggatgcatagggcaaggttccccttgataatcaatcagaagacagtttaccgtttaaatactaagtcatgcctgtgttctagatagataattttcatgacctgttgtttttcaaaacttctcaataagaagctcatagcctacataaaaataatgtgtttaaagtagagaattgtatagttgtaggtattattttcaggggtttgtttcttcatttaccttctactt

SEQ ID NO: 628 - DNA, 346 bp, Homo sapiens
gaaagagcacagtaagggaagtcaatggatagggagtacaaagaaatacgaggataagagatggcaatgttaacattcttccagctgtactattatagattcgaagtaattacttttcccctcttaatgtaaaagcctttgagattgttgccatctgttacaaccagctatcctttttgctattatctgatgactcttactagatatgtagtatcattcattaatgacttgggtaactggacattcttccattcctgtttagcccatgcggttgaacccttcaacagcatagcctaggactaggttaactataaccccatgtgaatggtctatgaatattgaacat

SEQ ID NO: 629 - DNA, 363 bp, Homo sapiens
atttacattgtaatttgagaatttaattgaaaatatattagtcaacaattgcagggctgataaagattcagaatttcgaattcatggaaatccataataggatcagtttatgtgtcaaaagatccttttatgtggaatgttatctgttctttatgtagaatgttatctgttcttttgattgttgggatttctatgtaactgtgttattttactcctaatccatcctgtattcaagtgtatagtcccaacttttgttatcgctctccagggaagactgccaggaatatatctgcagtaaaacaaaatgaggtgatttattatactgaggaagaatatgtgtcatagggaaccatataggatttg

SEQ ID NO: 630 - DNA, 2632 bp, Homo sapiens
ttttttttttttttccattctccagggcagtgattctcagctagatacacaacagaatcatctggaggacttgttaaaacagaatgctaagccccatccccagtctccaattctgtggatctggggcagagtccagtaatttgcatgtgtgatgccgctgctgctgctgttcttggaagcacaccttgagaaccactgcctggggaacagcttagctgctatgagaatctgattctgtgttcatattccgtatcacagatagctctgcttttcaattgtggtttctttttttaatgtcttactaagggggaaaaaaaggaacgccactttatataaacctgaccttttggtaagcctgggtagtaacttcccatgtggagtaaattaatctctttcatgcatgcctcgtgctctggaaaaagtaaaacagattgtgttagacatttaccaagtactttttctgttggtggtcactgccctaagcctatcagaactggtttctacccttaagaagcttacaatgtagtaaggcggacatcccaacaaaccagacattggagttcattgtgtgaggtgctatgatggattataagacatttatgattgactgagtattatgaaggggtgaagcaaactcaaggtggcaaattagggaggaggtagatcacacaggctttcctaatgggattacttatgactcattgagtagtgaaagatgaataggactttactaaacagaaactggaagggctttctgggctaagggaacagcacagaagcatcaaatacactttacctttctagggctgccagtagtttaattcagcaataccacatcacaaaggtctttgtgtgctttgctaatgagtttgaactttatcataaaagcattttacaaagatcacactggcagctgcattttggaagggatttgcctagaggtaggataactgcggggggtatgtctatagcaataaaagtgagaaaatatgagatctgaaggagctaacattgtggcagtggcagtgggtataaaggagaagggaggactagaagagatatttaagatgcaaacaatgtaggaactgggtgattatagaactgaaaagtgagtgagagggaggaatccatgagaactcacatatttctggttaggataaaagactgattgactgacatgaagactacaagagaaaaaaacagacttggagttgaaacttcagtttaggacactgaaactgaatgatgtgtcattcaagtggaaaggccattaggcagttagatatgtaggcttagagcacaggagaaaggtcttaaaaccctgggcttatgggacgttaccacggagactgcacagagttgagaagatccattttaaagctgatgatgaatatattttcgttataaggagagaagcaatgttaggggtgtcttcccattgctggagtgggtcatttgcagtatgcagtgcataaactcacaggctgtccttatgatgaccttttgttcattcttacattcagtatacagatgaacaaaggaagtattttatgtcttgtaaattacaagggactatgcagtatgtaagggaagatacaggagagtaagggaaggagaaagagggtgactaacaagcttctcagagattagccaagaactatggcattgaatctaggtctctcctgtcctcaatttgacactctccactcccctgacatgttttgtattaaaatatatttttctttttatgaacatgtcatacctatggctcacctgtgtccttgctaacctacaggtttggacaatctggaattggcagcatgcatgactgtggagctttaaagccaccctcctgagagaagagcagctgactcatgtacctcaccatgcagatgagggtgtgttataacccacagtgtgtctgtgtccctggatgaactgagcactttataatggagtttttctgcatctcaaaaagaagtcacagattaaatggtaactgcaagagctcatttctctatttgagtgagtgctttatcaaaaaaatattttattcctgctgctttaccacagggtcaattcaagtctaaatgaatctggcatgtataaaatatatttttatatagctccatatagagatatagctctacacagccattaacagactcacacacaatcattcttttattccaggtgtgaactgctatgctatttcacccagttcaaacacaggtcattggctttcaaactaattttggaaagcagacactgtgtagttggtaggtggaataaaatgaaaacaaaaaattaatatgcatggcagtttaactagctgtgtatctctcatggaaagggggtaatagtctaaaattatttactcatttttttttaaagtctttaaaagaaggcaatgaattgccagtaatttccccaccttaactcatggtaatttgtttcctgctgggtgaaaacgcagggatcttgaaactgttaatgaactttctttctcctgatctgtacaatgtcaaattcatttctttttttcttacttcaggttttactattctgttttgtttgttccatttttgtattttttcctgaggtcagggatgattctatggaagcatgaaaa

SEQ ID NO: 631 - DNA, 2634 bp, Homo sapiens
ttttcatgcttccatagaatcatccctgacctcaggaaaaaatacaaaaatggaacaaacaaaacagaatagtaaaacctgaagtaagaaaaaaagaaatgaatttgacatgtacagatcaggagaaagaaagttcattaacagtttcaagatccctgcgttttcacccagcaggaaacaaattaccatgagttaaggtggggaaattactggcaattcattgccttcttttaaagactttaaaaaaaaatgagtaaataattttagactattaccccctttccatgagagatacacagctagttaaactgccatgcatattaattttttgttttcattttattccacctaccaactacacagtgtctgctttccaaaattagtttgaaagccaatgacctgtgtttgaactgggtgaaatagcatagcagttcacacctggaataaaagaatgattgtgtgtgagtctgttaatggctgtgtagagctatatctctatatggagctatataaaaatatattttatacatgccagattcatttagacttgaattgaccctgtggtaaagcagcaggaataaaatatttttttgataaagcactcactcaaatagagaaatgagctctgcagttaccatttaatctgtgacttctttttgagatgcagaaaaactccattataaagtgctcagttcatccagggacacagacacactgtgggttataacacaccctcatctgcatggtgaggtacatgagtcagctgctcttctctcaggagggtggctttaaagctccacagtcatgcatgctgccaattccagattgtccaaacctgtaggttagcaaggacacaggtgagccataggtatgacatgttcataaaaagaaaaatatattttaatacaaaacatgtcaggggagtggagagtgtcaaattgaggacaggagagacctagattcaatgccatagttcttggctaatctctgagaagcttgttagtcaccctctttctccttcccttactctcctgtatcttcccttacatactgcatagtcccttgtaatttacaagacataaaatacttcctttgttcatctgtatactgaatgtaagaatgaacaaaaggtcatcataaggacagcctgtgagtttatgcactgcatactgcaaatgacccactccagcaatgggaagacacccctaacattgcttctctccttataacgaaaatattattcatcatcagctttaaaatggatcttctcactctgtgcagtctccgtggtaacgtcccataagcccagggttttaagacctttctcctgtgctctaagcctacatatctaactgcctaatggcctttccacttgaatgacacatcattcagtttcagtgtcctaaactgaagtttcaactccaagtctgtttttttctcttgtagtcttcatgtcagtcaatcagtcttttatcctaaccagaaatatgtgagttctcatggattcctccctctcactcacttttcagttctataatcacccagttcctacattgtttgcatcttaaatatctcttctagtcctcccttctcctttatacccactgccactgccacaatgttagctccttcagatctcatattttctcacttttattgctatagacataccccccgcagttatcctacctctaggcaaatcccttccaaaatgcagctgccagtgtgatctttgtaaaatgcttttatgataaagttcaaactcattagcaaagcacacaaagacctttgtgatgtggtattgctgaattaaactactggcagccctagaaaggtaaagtgtatttgatgcttctgtgctgttcccttagcccagaaagcccttccagtttctgtttagtaaagtcctattcatctttcactactcaatgagtcataagtaatcccattaggaaagcctgtgtgatctacctcctccctaatttgccaccttgagtttgcttcaccccttcataatactcagtcaatcataatgtcttataatccatcatagcacctcacacaatgaactccaatgtctggtttgttgggatgtccgccttactacattgtaagcttcttaagggtagaaaccagttctgataggcttagggcagtgaccaccaacagaaaaagtacttggtaaatgtctaacacaatctgttttactttttccagagcacgaggcatgcatgaaagagattaatttactccacatgggaagttactacccaggcttaccaaaaggtcaggtttatataaagtggcgttcctttttttcccccttagtaagacattaaaaaaagaaaccacaattgaaaagccaagagctatctgtgatacggaatatgaacacagaatcagattctcatagcagctaagctgttccccaggcagtggttctcaaggtgtgcttccaagaacagcagcagcagcggcatcacacatgcaaattactggactctgccccagatccacagaattggagactggggatggggcttagcattctgttttaacaagtcctccagatgattctgttgtgtatctagcttgagaatcactgccctggagaatggaaaaaaaaaaaaaaaa

SEQ ID NO: 632 - DNA, 301 bp, Homo sapiens
gctgctaactcagctgacaaacagggaaataaactattattccttttccctcaaccagtgcctcccactaccctgcccagaccccagggattcctgggcagataccactgtgggctaccctagccagccttttgcagccccattcctgcttgcttccccacacctccccagccagagcagacctggaccccaacagaaatattcacccctagcggcaacactagcactctcttggacaaatgtttagtgatctatccatcacctgccaccagaccccacttcccttccatcagtggctatt

SEQ ID NO: 633 - DNA, 312 bp, Homo sapiens
aatagccactgatggaagggaagtggggtctggtggcaggtgatggatagatcactaaacatttgtccaagagagtgctagtgttgccgctaggggtgaatatttctgttggggtccaggtctgctctggctggggaggtgtggggaagcaagcaggaatggggctgcaaaaggctggctagggtagcccacagtggtatctgcccaggaatccctggggtctgggcagggtagtgggaggcactggttgagggaaaaggaataatagtttttttccctgtttgtcagctgagttagcagccctggttttga

SEQ ID NO: 634 - DNA, 1270 bp, Homo sapiens
gagagagatctcttcactgatttcccctattctcaggctacaccttagaccaaacctacgccaaaatccattttgctatcatattcgtcggcgtaaacctaactttcttcccacaacactttctcggcctatccggaatgccccgacgctactcggactaccccgatgcatacaccacatgaaacatcctatcatctgtaggctcattcatttctctaacagcagtagtattaataattttcatgatttgagaggccttcgcttcgaagcgaaaagtcctaatagtagaagagccctccataaacctggagtgactatatggatgccccccaccctaccacacattcgaagaacccgtatacataaaatctagacaaaaaaggaaggaatcgaaccccccagagctggtttcaagccaaccccatggcctccatgactttttcaaaaagatattagaaaaaccatttcataactttgtcaaagttaagttataggctaaatcctatatatcttaatggcacatgcagcgcaagtaggtttacaagacgctacttcccctatcatagaagagcttatcatctttcatgatcacgccctcataatcattttccttatctgcttcctagtcctgtacgcccttttcctaacactcacaacaaaactaactaatactaacatctcagacgctcaggaaatagaaaccgtctgaactatcctgcccgccatcatcctagtccttatcgccctcccatccctacgcatcctttacataacagacgaggtcaacgacccctcctttaccatcaaatcaattggccatcaatggtattgaacctacgaatacaccgactacggtggactaatcttcaactcctacatacttcccccattattcctagaaccaggcgacctgcgactccttgacgttgacaatcgagtggtactcccggttgaagcccccattcgcataataattacatcacaagatgtcttacactcatgagctgttcccacattaggcctaaaaacagatgcaattcccggacgcctgaaccaaaccactttcactgctacacgaccaggggtgtactacggccaatgctctgaaatctgtggagcaaaccacagttttatacccatcgtcctagaattaattcccctaaaaatctttgaaataggacccgtatttaccctatagcaccttctctaccccctctagagcccactgtaaagctaacttagcattaacttttaagttaaagattaagag

SEQ ID NO: 635 - DNA, 408 bp, Homo sapiens
ttttattaccatttttgcatcattttaatatattgtctttggaaacaaaatacatcatgctatttatagcattctgtttttagtagtggtatttccatttacaacatatagtaaattccaaatgctggaaatgtcagatcctagaaaatgtaacattcctacatatgatgttaacattgttcttgaacagtcattgaccaaagatgtattcgatgaatctgattttttctgaagtagatgattctgatgattcagatgattctgatgttagttctgtttagaaataactccaagaacagtttttatattgtattttcacattgaaaatcagtcaaatttgcttcagcctcaaagagcatgtttatgtaaaattaaatgagcagtgggagtgagcgtcacatttttttg

SEQ ID NO: 636 - DNA, 1270 bp, Homo sapiens; identical to SEQ ID NO: 634

SEQ ID NO: 637 - DNA, 408 bp, Homo sapiens; identical to SEQ ID NO: 635

SEQ ID NO: 638 - DNA, 15643 bp, Homo sapiens
cccagctctcaggacaagggccctgggcgatcttttaaaaaagccgattgggtgtctttctaaaattacaaccagtacttcatcgtcaagtttctgggaagggagtcccctccagattctcatggagtgacaaatcttgactcttgctcctggaatttttcaggcccaaactagcgtttctacaatgatttatttggcaaatttgtcttgattatgggtggctgatgaggaacgtgcttttgttaggaaccgaaactgggcggcggtgagggcgtgtacgcaatgagtcctagagggtaaaaatcaagagcgttaagaacctggaaatgccgagacggcctccctgactgggacgaagcatctgcagatctatctcagtggcggggtcacgccacagattttgaaaactgaccctctctgtctccgttttcggttaagggtgggaagtgccggccgggtctttgctggaggctaggtctccagccagattgtactgcagcatcgtactcttcagggctagaaggggcctttgaaggttgttacactacccagtctaggaatcgcgtgtactccaccaccgccgaattccagcctttgcttaaataccacccaaaccggagaactcactactagacgccacttgggcagccaggcttagggcttttccagactttctggccccaaagtctgacattgacttagaagggatgaagggctggggcgagcggaagtagagagccaaatcctgcacggggtgcctgcctggtcctaaaacctttaacggctgggagacagaaaagactcaggccaggctggcatgtagcgatctctctaacccagctgaccaggttccaacaggatgacgcctgcgcagtaggtccaaagtctcacggcgcacagacgactgtctgagagaggggccgctacgccgcacagcaaacaagctccgcgacgtttccaggacccggataatcccgcccttagagcagagccggaagaaggcgggacgaaccggaagagggtgaaatgctttcggtaggcactccacggctgtgaagatggcggcggctgcgtggcttcaggtgttgcctgtcattcttctgcttctgggagctcacccgtcaccactgtcgtttttcagtgcgggaccggcaaccgtagctgctgccgaccggtccaaatggcacattccgataccgtcggtgagtattcacttcactaacgtctgaacctagaggagcaaggggtggggctacggcggcccaaggggtccatgaaggttccgcaaaagtctcttcaaaaggggtggggttgctgggatggtctgtgtggctagccaactgggacccacctccctggagtggaaagccgcgcacttctgtgattaggctagcgggaatgtaagggccacttcagcaacagaaaggagtggtggagcggcttctcatcagaaaaacagaactttcagtgcctgacttgagatgtaaacttgatgtacaaacggagagttgtttatctttcagatgtttcacagaatccagtgtccccgggttggataagaaagatatgtaaataggagtcttcatttctttctttctttttcttcctctgcacttcttggtccctgggtaattctgcttacgagatggttcgacttcgcttcaactttggaatggctattctaagctttactgtgtgactagaaagcatagagatttaagaaatgtgttttaacatgggaatggttaaaattgaagaaatagtacttaaaatttaatgtggtaaggctagtctttcatttggataattaactacatgggttgaccctttctgccccttacccattttaaaccttatttcagtaacaggtatagtcctgtgagcagacaaaaaccagatgcagggaggaaatgctgaaaagcattagccccattaaacctacgttggcctttttgtttcattctgctctgctcactgactgtaatgtccaaatcttatttgggcttttattatggtaaacgttataccttttgttcagtggtgaagattttcaggtgttcagttaggtttttacttgttactaaaatggttaatagttaagtctttttagatttgaaaataaaactctggttatttgcacacagaatagttcattagaaaaaatgattggttattctgagcagtgattggtgagtaaagggaatgaactgattaaggggtacgtcccataaagatttaagttaagttggaatttctagcagtcttagatagttatatgatgctttggtaattgaagccatctgaggctaattatctttcctttatgtttgcaggggaaaaattattttagttttggaaagatcctcttcagaaataccactatcttcctgaagtgtgagtttttgaatttcatgaagttttaatttgaattttaaaaatttataggtaatgttttaaattacctattttataagttctgaaatctaatagtctggcattatctaggtataaatatttttagtattactaaggtccttttactgaatcatcttcaaagtactcgtgtgaactttattttcttctcttgtttttctggtgtttacattgcatatatacactatgtagacattatatattagtatatataatgtatatattaatatatatgctgtatatactacattgaatattcagtcacatctcagtcgaattacatttacagttgatactttctgagaaaagcatccttaggtgattttgtcattatgcaaacatcatagagtatacttaaaactggatggcactacacgcctagtttgtatggtacagcctattgctcctaggctataaacctgtataacatgttactgtactgaatgctataggtggttgtaacacaatggtaagtttttgtatatctaaacataggaaagtagagtacaaatacgatattacaattttatgggacccccgttgtatatgtagtctttcatttactgaaatgttatgtagtgaatgactgtgattatgttggggttgattccctgcatggtggttttaatctgttctgtgtagattaaagaggttttactcttgtgtgcttgttaaatgtttactgcaaacatgacctaggtttgtcaggccgttggctgtgaaggaatatatttagtagatcctttatttacaaaaggagtattttactgctttggaagaggaagctcagatattatcaagaaatagggattatgtagaacaaaactagtttgtctagtggaaaaatgactgtatctgaatctaaagtatcccattgtgtgttcagtaaaagcttccttttagttctgaaaccggctttaatttagagaacgattgatcgtgggcagctttatttctagatgagggataaaaatcctgatgatagatgtgtgattctatgcatactgtcttcacggaagtgcaaaattttaagtcatagttggataattttattcttttcaattgtttagtgagtaattattacttattgcatagactgtggggaagtaatagaaaaatgttcttccctcatcgagcttacattctagtgggagtgaaaacagcaggtagaatttctctgaagaatatatactgtatccatgaatatgtaatcagtctcctgaccagtgacttatatttgatttagatcaaatctactctgacactggccttgtgagattggtttactgggtaacctagtaacccttgtcttttggaatagcttgacagcctgtttgctgttttattcttttattaggtccagtctttttttctcgtgtagtttgatctagtggtgttttgccaagttaaaccaactgcattttttttaagatggtgtctcactctgtcacccagactggagtgcagtggtacgatcttggcttactgcaacctccacctcccaggttcaagcgattctcctgcctcagcctcccgagtagctgggattacaggcatgagtctctatgcccagccctaactgcgtattttgaagtgtttatatttcattgtttttggaggatttgaggcactttattttttgttgttgttttttgagacggagttttgctgtgacgcccaggctggaatgcagtggcacgatctcggctcactgtaacctctgcttcctgggttcaagcgattcttctgcctcagcctcccgagtagctgggactataggcgcgtgccaccacgccggctaatttttgtatttttagcagaggtgggggtttcaccatattggccaggctggtctcgaactcccgacctcaagttatctgcctgccttggcctcccacagttctgggattacaggtgtgagccaccgtgcccggcctgagacactttaacattatctttttctttgttatttctgtgctttctcatatttaccagttgtctttgattttgtactttttgggggatggtatatagctttccatggaatagctgggaccatttttttttttttttttttttttgagacggagtctcgctctgtcgcccaggccggactgcggattgcagtggcgcaatctcggctcactgcaagctccgcttcccaggttcacgccattctcctgcctcagcctcccgagtagctgggactacaggcgcccgccaccgcgcccggctaattttttgtatttttagtagagacggggtttcaccttgttagccaggatggtctcgatctcctgacctcatgatccacccgcctcggcctcccaaagtgctgggattacaggcgtgagccaccgcgcccgaccttattgtctcttaaagcctttcatttaaagttctaaatattgtcttgtaacataaacagcagtatttttgctgccaaatttccttacaagtctcctgtttgggggatgtgttcttactggctttttattagttaatcctgtccctgtatggattattttgaatagttcatagcccaattgctttttatcatttccataaattctatccaacaggtcaaatttttgaacattctaatagagtcctttgaaaatgtgttggtcatctaaaaattagtttgagaaaacagtttaaaagaaaaaaaaaggaagcttataattaggttgcttcttttgttatgaatgaaaagtagattcctaaatgcagtcatgtttatttttgtcatgtttattattacatttatataaagtagggagtctttagtatatttttcctttcatagctagaatcaaagataaaagcgaatactgacttcctccagctaatcagtcatatagtcagatttaccctcccaagtcttcagaataatgtcttgatccattagaatactgtgttccaaactgtgtttaatgagctttatgaagcttccatgataacatgagcttccttgaggcctcttttaaggtaggctttgaaaaaaaaaatctgatactcttatctttgcttttgctatttctaccttccacagccatgtttgcttttcgttcattgctctttctgttctatcttgatatctttcaaggtctgagatagcaattttgctctcagtggaactattatgtatatcatcatttaacaccatttaacagttgttaatattgccttgtgacatgcattcctaattttattattgcttgtctcttcaactagccttttgaagggtcttaataatttgtttccactcgtttccctctttagcctaacagtgtgccattatacctttgtaatacttgtgctatttatttatttatttatttatttatgttttttgagacagggtctcgctctgtcgcccaggctggagtgcagtggtaccatcatggctcactgcagacttgacctcctgggctcaagtgatcctcctgcctcccttgcctgagtagctgggactacaagcatgtaccaccacgcctagctttttaatcattttttgtagagatgagttctcactatgttgcctagggtggtcttgagctcctgggctcaagcgatccccctgccttggcctcccaaacttctggggttataggtgtgagctaccgcacctagcctgctcaataaatacttaaataatagaagactggcttgaatttagagtgctttatcactcccaggtttttctcaatagagatccagaagttaggactttatggcataaaaatagatccacagtttccagaggttaaaaactgcttacctgctatttttctatgaacaacaatacttttatcttaatatccagctctttttgcatgtattatttcaataccttatgtttggagaaaggatggtctttgagtatctcagtttagggtacgaaatgaataggatataggttaacagcttaggaaaaatgctttgttggggaattatcttttgttaacaaagatttcttcttttgtagttgatggagaaccttgtgacctgtctttgaatataacctggtatctgaaaagcgctgattgttacaatgaaatctataacttcaaggtaaggaacataaaattacagagtttttttggaccttagtgattatctggttccagtctcttaatttcatagaggaaagagtatcatgtagctatggaggaggagagctgaaactagaatgcatgcttcccaatttgcagaccaccaattctcaaactttttggtttcagaactcttatatttgtaaaaattattgtggactccagaaagcctttgagcatgtgggttatgctattagaaattacaactgagaaaatataaaaatatttattagtttattttaaagtagcaataataaacttattgcatgttaatataaataactgtttttcccagaaaaccacacagaagagtaggattgttttgtatttttgtaaatttgtttactatctggcataacagaagatcactgtattcttatattccctccttcactcagtctgttgcaataatttggcttaagtacatgtagaaaataatgacctcatacagatatatagttgggaaaaggaatggtattttaatggccttttcagataactgaggatattcttttttgattctataccaaaactcaacaagtggaagtttttaaaggttagttgcaatgtggaatctgaaatattaatgaactttttttgtactctgataagaaatccactgatatgaatgtatcttttacctgtgtgtgatcttgtagcatcatttattggtcatttagaaaatagcagttgactgaattatatacatttttataaatattaactcatttcacacttagctaaaaattacattgtttataactataccctgccctcttcatctcatcagtaggttcttaagttttggaagccgttaaattcagtgtagcagatacaagttcttcaaaattccagtttttgcttgaaatctcaaattttattttggcagtgaatactgtcagttgtcttccttgaggggacagcctctgttgcccatttccagagaaataactctcaaataaccaagtctgagtaatggtagtttttcagtcattctttcaagtaaatatggtgtttcgtggaaaaaatgattagtttaactcacaagtcaaagcaattgcagagtgctttatctcaagacaataatttattgtattttgcatgctttccattttgtcacctagattatttaaaaagtcaggtactcaaaaggtccagatttaataacattaataatttttactgctttatctaggatattcttacataaaagtggcatttttaaaaactgccagtttgtgactatgaagaatatgactgctagtagaattaaatgccactgccttagttcctgataaggggcaacagttttacccactattgcttttgtaatatcgttacaagtcaaatagcatactattattattatgaaaatagtttttttttttttgagatggagtctcactctgtcacccaggctggagtgcagtggcgcgatctcagctcaccacaacctctgcctcctgggttcaagtgattgtccagcctcagcctcccaagtagctgggattacaggtgtctgccaccacacccggctaatttttgtatttttagtaaagatggggttttgccatgttggccaggctggtctcaaactcctgacctcaggtgatccacctgcctcagtctcccaaagtgctgggattacaggcgtgagccattgtgcccagccatgaaaatagttttgtctatggttcaacggccacacttttgagaattgccataatctagaatacttgagcgttgaaaatatattgctcaaagaataaagctggaagcatcacattacctgacttcaaactgtactacagggctacagtaaccaaaacagacacaaagaccaatgaaacagagaagacagcccagaaataaggccgcacacctacaaccatctgatatttaacaaagctgacaaaaaacaagcaatggggaaaggactccctatttagtagatagtgttgcggtagcgtgctggccatatgcagattgaaactggaccccttcctcacaccatattcaaaaatcaactcaagatagattaaagacttaaatgtaaaacccaaaactataaaaaccctggaagacaacctaggcaataccattctggacatgggaagtggcaaagatttcatgatgaagatgccaaaagcaattgcgccaaaagcaattgcaacaaaagcaaaaattgacaaatgggatctaattaagtttaagagcttctgcacagcaaaagaaactatcaatagagtagacagcctacagaatgggagaaaatatttgcaaactatgcatccaacaaaggtctaatatccagcctctataaggaacttaaacaaatttatatgcaaaaaacaaccccatagaaaagtgggtaaaggacatgaacagacacttttcaaaagaagatatacagccaacaagcatatgaaaaaaaaaaagctcagtatcgttgattattagagaaatgcaaatcaaaaccacaatgagataccatctcacatcagaatggctattatgagaaagtcaaaggataatagatgctggcaaggttgtggagaaaagggaatgcttatacattgttagtgggagtgtaaattagttcaaccactgtggaaagcactgtggcaattcctcaaagagctaaaaacagaattaccatttgacccagcaatcccattactgggtatatatccaaagtaatataaatcattctaccgtaaagacatatgcacatatatgttcactgcagcactgtttacaatagcaaagacatggaatcaacctaaatgcccatcaatggtaaactggataaatgtggtacatatgcggccataaaaaagaatgtgatacatatgcaaccataaaaaagaatgagatcatttcctttgcaagaacacagaaggagctggaggccattaaccttagcaaactaacacaggaacagaaagcgaaataccacgttttcacttataagtgggagctgaatgatgagaacacatgatcacaaagaggggaacggcagacactgggcctacttgagggtggagggtgggaggagggagaggatcagaaaaaataactcttgagtactaggcagtacctgggtgatgaaataatctgtaaaacagttccctgtgagttcagtttacctatataacaaagttgcgtatgtataccggaacctaaaataaaagttaaaaaaaaaatatatatatatatatacacacacatatatatagttctgagttgaatttttcagaccttttccattctgtttctatctctcaatttgcatttttaagaagattatcctagttctgtgcttgcaacaattttctgctctatcttagcttatgagcatgaatatttttttgttgatgttgttaatttggtcaagtaaatcttttaagtatattttaatgtgacaaaaccctctacactctggcagtttcccagtctactcagaattgttagtagaactatgccttgtgagccaaagactagagtctaatagtccttgagtctgatagtgtttgattcttagatatttttatatagagcctttatctgatgctgttcatttttaaaatagcaaactcaaaattgtatctgtactgcaggtgaactgtttgttgtgctgtgctcttagtatcttattttttggaaggtgagttaactactctgtattatctctttttccaggcagaagaagtagagttgtatttggaaaaacttaaggaaaaaagaggcttgtctgggaaatatcaaacatcatcaaaattgttccagaactgcagtgaactctttaaaacacaggtaatctttgaaagtgattggagataaatagaataggcaaaaattggaatgtatatatttttggctgtatccacttccgacttctcaagtatttcttttggcagaagtaagtggaagcatgttctgataggtacatagtcagccacttatacatactcatcaaagagaggttgtactttgctttgtgtgtaaaaagcaaacccccatttttttattgtggtaaaatatacactacataaaatttaccattttaaccatttctaagtgtataatacagtggcattaaatatattcacattgctgtgcagccatcgacccatctccagtactttttttttccccaaggcagattcttgctctgtccgccaggctggagtgcagtggcacaatctcggctcactgcagtctccatcacccggatctaagcaattctttcacctcagcctcccaagtggctagggctacagattcacaccattacgcctggctaattttttttgtattttctgtagagacaggatttcaccatgttagccaggctggtcttgaactcttgacctgaagtgatccacccaccttggcctcccaaaatgctgggattacaggtgtgagccaccgggctgagccccatctctagtacttttatcatcccaaactgaaacatcatacctattaaacaaaaattccccaccttccaaccccaagaccatggtaaccactcttctactttccatgaatttgactattctagatacctcatataaatagaatcatacaacttttgttcttttttgtctgacttcttccacttagcataatgtttttaaggttcatccatgttatagcgttatcagaatttcattcctttttaaggctaagtgatgttctattgtatgtatgtaccacattttgtttttccattcatctgttgatggacatttaaaacgtcacatttttaattctttggtctcctcatctaattaatatgttcccagaaaaatcagggtttttaaaatttacttctatagatctgaaatcagaagggtatcatcattgtcttagagttcaatttcacaccttaattttgtagaaagagggagatgtgaataatcatacatttttcgtgcttacacatatgcaatcatgtaagtggagattctgatatcaaattttgttgtcttagaaatagtaatctcagttttttgatagaaaaattttatatgtgttgaaaatagttatagtaattatcatctatacttgtccttactatatttaaaaattattttggaatatttagcaacttgccttgaactgtcaaattactagaagtaaagtttattattaagaagacaaatttagtcattggtaattgaggccagatgcggtggctcaggcctgtaatcccagcactttgggaggccgaggtgggcggatcacctgaggtcaggagttcaagaccagcctggccaacatggtgaaaccctgtctctacaaaaaaattagccgggcatggtggcgggtacctgtaatcccagctactcgggaggctgaagtgggagaatcacttgaacccaggaggctgagatagtgtcagtgcactccagcctgggcgacaagagtgaaacttggtctcaaaaaaaaaaaaaaaaaagggataattgatgagcagatgaattaattggtaattgaaggaagagttccgcttttattataacttagattttatggtcttggagggaaaagaaaatagctttaagatggtgaaagaatggtagagaaagctagaagcaatgtgatgttgtgtagtttgtatgttttctgttggttttccaaatttatcccttagactaggaggattggttggtcttttcttggatttgattatggaaagctacctgatgcatctggttgctggaggctgactacttttagatgtgctgtaatctttccagggtcttggcttattggtaaggtttcctctcctcctccagtctaatgtaacagggttgaattacacagtctcattactcaggaaggacaatgcctcatctactgataactggtaagaaagataattagtgtagttttttacaggcataaaaaatgtagtatggtggaagggacagcagacctaagcatcaagaatattaggtttaggccgggcgcggtggctcacgcctgtagtcccagcacttcgggaggccgatgtgggcggatcatgaggtcaggagattgagaccatcctggctaacacggtgaaaccctgtctctactaaaaatacaaaaaaattagccaggcatggtggcgggcacctgtagtcccagctattcgggaggctgaggcaggagaatggcatgaacctgggaggcggagcttgcagtgagccgagataacaccactgcactccagtctgtgcaacagagcaagactccgtctcaaaaaaaaaaaaaagaatattaggtttaaatcctatttctttgtctaaagctttgtagttttgagccacattttactcatctgtagaatgaggggaaatgatctaagcttcttctatcctaagcatacatcctatatctaaagctttgtcattcttaaatgtttattattctgatagaaaaattgaatggccattttggtttgatactattttctagttcccagcagggttttattcacttgtttgtggttaattggaaatgttttgtctactgatgctgtgttattatatttactagttagggtgtggtgttttgttctaaccatttctttgtattttgagctacacttttcttctagtatttacacacctttaatgttttgttttgtgtttcttttatagaccttttctggagattttatgcatcgactgcctcttttaggagaaaaacaggaggtaattgttttcattatatatttctgagagtgcagtaaaaactttggtggtgcaggagatacccgtgctcactgcatctctaaggagggagtgctgcacctggggagcaggcttccccagtggctacaggaacttgggcagctaaaaacaagaagttctgaattaattattattatttttttaatgtttaaaggctaaggagaatggaacaaaccttacctttattggagacaaaaccgtaagtatatttggggatttggggcattgaacacatattttagttttcttaaatttgtgtatttctgaattgttctcccatactatgctaatatttgaaaagaaagttaaatctggaagctatagaccaaaatgttaaaaatggttggatctctggatgatagtatgagtgatttttagtttctttgtgttttctgaattttctactgtacacatgtattgcttttataattatccccccataaatatctgtaaacaggaagaaacttattaaaaataagaactcttaaacttcatctaaaattatctgtgataaaatataattgaaagagagtttggaaaaattgaaataaggtctaaagctataaatatgccttaagttttcataaatatgcattgtatggatactattttcaaattcataattaattcctcaaaacatcaccagttaaaaatttagaggaaggatgacagctatcaatgttgggttatggtttttacaaagctgattaaagtttttaattttataacaactttatgaaggtataatatacatattacagaagttatgttttgtttcgttttttgagacaaggtctcactcttgcccatgctggagaacagtggtatgaagatggctccctgcagccttgacgtcttgggctcaagtgatcctcctgcctcagactccaagtaactggggccacaggcacataccaccatgcctggttaattttaaaaaattttttgtgggggttgggtctcaccatgttgcccaggctggtatagaactcctaggctcaagtaatagtctcacttcagcctcccaaagtgctaggattataggcgtgagccactgcacctagcctaaaagttgttattaaagttattaaagcatataattgagtggtttttagtattctcaagttgtgcaagcaccaatcgctaattccagaattgttcatccccaaaagtagccccatactcatcagtcactccgcatttctcctgcccccagcctctgacaatcagtaatctattttctttctctgtacttgccttttctggacattttgtgtaactggaatcatataatacatggacttgtgtctggcttctttcacagtttacactctgtctcaacttttacttcctgcttgcacagaaccttaagatcagccagtgaatgattagggcctcctcaggtctctcctggacctgtgcacagccctgggcatgtgtgcacagccctgcacatatggccttctagatttccaggaatattttggagctttccaaaattcctatggacatctcattctccaatttttccttttaagtttccaatcagcctcttaatagcctcagttggtaaggtcacctcaggcagctgtgatcttgaaggattgctgttcaatgtttttgacaaatgctttgagtacagggttgttgacactgggtgatctctgagtcaggtcagataaagacaagccctgagaatggagcttttcagcaatttgccagacagctcaggtgatcagtcttttagggacctccaaatgtattttttcctttgggaggcctaggtgggcagatcacttgagagccaggagtttgacaccagcctggccaacgtggtgaaaccccgtctctaccaaaaatacaaaaattaggcaggtgtggtggtgcacgcctgtaatcccagctacttgggaggctgaagcaggagaatcacttgaacccagaaggtggaggctgcaatgagccgagatcacaccactgcactccagcctaggcaacagagtgaaactctgtgtttgcttcccctaccccctttgcctagtggctgctaagctgttgtttttatcagctgttaacagtttcagggactttggttttaaggagcttgggagagaggaatgggaatagggtgaacacagacatctcaagcttgcttttctttcctagattcagatgcctttcttgaagaaacatttcttggattgttgaaagactttaataatttccaaagttccaaaagttgattttgatagtttttgccagtgttttcgttgcttttatggatgagtagattttcagagtttcttattctgccattctgaaagtgttctcactacctaaacc

SEQ ID NO: 639 - DNA, 2425 bp, Homo sapiens
gtcagtttggtaaatattgtattgcatcgttacttaaatgcttgtatagtgtcttattgtatgagtacattgcaatttgttcaattctctgttcttgaacttttatgagtttcattatcttggaattttatgcagtgttgtgattaatattttaactacatttgcttttaagtctttattttctgatctcagaagaattgtatattgggataagtttttaattctataacttaaaagtaaaaatcctttgtaattttatgttctaatagttttagcagtttggtgtgattacacagagcacatgcatattaaccaaaataagatcatattatataccattgtataattttttctttttattaccaaattggtacattgaatactacttcacctttttatggctgcttagtgttccattttattatgattttaataactcccaattgatgaacattggggttgttcccaaatttcccctattatggataaagttatgttcataatgtctagctatatttctgtgtacatttataatctttaggctaaattcctggaggtagaattgctagatccacatgtatgcacagtttaaaggtgctttttcatagcaatttatggccccaaaaaagtgagagtgagtgtctttgtttatgttgctatgaaaggacacctggagctgggtaatttataaagaaaagaggtttatttggctcactgttctgtgggctatgaaaaaagcatggtgccggcatctgtttctagtgagggcttcagggctgtttctactcatggtggaaggtgaaggggggagcctgtgtgtgcagatcacctggcaagagaggaagaaggaaagagggaggaggaggagaggaggtagtgggctttttttttaataatcaaggaaccaatagagggataactcattactgaaaggacagtggcaccaagccattcattagggattggctcccatgacccaaacacctctctctagaattcacctcaaacattggggatcaaatttcaatatgaaatttgggaggacagatatctaaaccatagcagtgagtttccatctttcctcacaaaaacaatggctgtcatcatttaaaatagattttatgcagtttgtctagttaagcaacaatttgttcttgtaaattgtatttaaaaagttatcgttaagccaggcgctgtggctcacacctgtaaccccagcaccttgggaggccacagcaggcagatcgctagagcttacgagtttgagaccaccctgggcaatatggtgaaacctcgtctctacaaaaaatggaaaaattagccagaaggtggcacgtgcacctgtagtccccgctacttgggagactgaagtgggaggatggcttgagtctgggaggcagaggttgcagtgagccaaagtcacaccacttcactctaggcgatagagccatacctcgtctctaaaacaaaaacaacagcaaaaaaattattgttgagggtgaaccttcatttatatggatattggcacttgtgctttcttcagttgtcttctgtgcacagcatactttgagttctactcaaggcttgagtcttgttacagtgattaaaactggctgaaaggtgagcctgttgaataccacaagtaatatttaggaatacttagtcaaaatatagtcaaaagaaatgaaagagttatctatcttttgatctttcttcctgaaaatttggtccaaggcaaataccttataatcctatttaaagaatattcacaggctgggttcagtggtaatctcagcactttttaaggcccaaggtgggtgaatcacttgaagccagggtttgagactagtctggtcaacatgacaaaaccctatctctactaaaaatgcaaaaattagcttggtgtggtggggtacacctgtaatcccagctacttgggtgcatgaggcctgagaatcacttgagcccaagaagcagaggttgtagtgagccatgattgcaccactgcactccagcctgggtgacaaaatgagactctgtctcaaaaagcaaaaaggatactcacaaattcagtacctccatcctatttcattaaagctctgattaaacatatatgtttatgggccgggtgtggtggctcacacctgtgatcccagcactttgtgaggccaaggtgggtggatcacctgatgtcaggagttcgagatcagcctggcaaacatggtgaaacctcatctctactaaaaatacaaaaaaaaaaaaaaattagctgggtgtggtggcgcacgcctataatcccagctacttgggaggctgaggtgggaggatcccttgaacccaggaggtggagattacattgagccaagatcgttccgttgtactccagcctgggcaacagagcaagactccatctaaaaaaaaaaaa

SEQ ID NO: 640 - DNA, 1270 bp, Homo sapiens; identical to SEQ ID NO: 634

SEQ ID NO: 641 - DNA, 408 bp, Homo sapiens; identical to SEQ ID NO: 635

SEQ ID NO: 642 - DNA, 543 bp, Homo sapiens
gttcgtttagcattaatccacctgacggaactggctaaacgcgttgactttctccgcagttaaggtcgtcagaaaaccccgtatcagcgtgagcagagcttcgtaatcggcttttgaaatcataccgctgttggcgtgcagataacgagttggcagacacagcgcgacaaccggacgcccgccgcccatcacgttgtagcgcccgccatccgtcgcaccggttttcatggtggaaaattgcagcggtaaatcgttatgtgcggcacagctttttaacgctgctaccagtttctggttggggaagtagcgcttgtcaaacagcatcagccccggcccctggcccagtttcagcgggtatttaatgttatcaatgcccggaacatcgcccgctacggcggtatccaacacgatcacgacgtccggtttaatgtgttccgccgaggtttgcgccccgcgtagcccaacttcttcttccacactgccaacgccatacagcgtaatttcgggattattcaccgtctgcaatagttcagccatcattgc

SEQ ID NO: 643 - DNA, 522 bp, Homo sapiens
ctgacggaactgccataacgcgttgactttctccgagttaaggtcgtcagaaaaccccgtctcagcgtgagcagagcttcgtaatcggcttttgaaatcataccgctgttggcgtgcagataacgagttggcatgacacagcgcgacaaccggacgcccgccgcccatcacgttgtagcgcccgccatccgtcgcaccggttttcatggtggaaaattgcagcggtaaatcgttatgtgcggcacagctttttaacgctgctaccagtttctggttggggaagtagcgcttgtcaaacagcatcagccccggcccctggcccagtttcagcgggtatttaatgttatcaatgcccggaacatcgcccgctacggcggtatccaacacgatcacgacgtccggtttaatgtgttccgccgaggtttgcgccccgcgtagcccaacttcttcttccacactgccaacgccatacagcgtaatttcgggattattcaccgtctgcaatagttcagccatcattgc

SEQ ID NO: 644 - DNA, 827 bp, Homo sapiens
cccgccgcccatcacgttgtagcgcccgccatccgtcgcaccggttttcatggtggaaaattgcagcggtaaatcgttatgtgcggcacagctttttaacgctgctaccagtttctggttggggaagtagcgcttgtcaaacagcatcagccccggcccctggcccagtttcagcgggtatttaatgttatcaatgcccggaacatcgcccgctacggcggtatccaacacgatcacgacgtccggtttaatgtgttccgccgaggtttgcgccccgcgtagcccaacttcttcttccacactgccaacgccatacagcgtaatttcgggattattcaccgtctgcaatagttcagccatcattgcgcagccgatgcggttatccaacgccttgccgaccactttatcttcgccccagcaggcaaaattggcttccgggctaataaaattaccaatttccacgccgcgcttttccacctcttcgcgactgttcgcgccaatatcaatgaacatctcatcaaatgacagcggttgttgcttttgcttttccgttaacgcatgaggcgcgacggaaccaatcacaccagggattttcactcccttgtgtgtgcgtatggttacccggtggttgagcatcgactgattccaccagccgccaatggtggtaaaacgcagaaaaccgctctcgtcgatgtgggtgaccttaaagccgacttcatccatatgtccgacaacggcaacttgtggacctttattcgccttacgggcaccaagttgccagaacatcgaagggattacttcaggccaggtcccgcggggttatccga

SEQ ID NO: 645 - DNA, 470 bp, Homo sapiens
tctcactggtagttgtgggagctaggactcttcacatcccaacctattacctctgctcttggaggcagagactgtacctcatcttcatacagcatcagcacttaacatgaagtgttgtgcatgtagtaggtgcttgtatatttgttgaattaaagggatttaggagtctgagtatacctaagtgaaataaacccttcattagacacactataaatgtgtctttattatttcaaagataatgttgactcagccggactagggtagctgttcaggattggagtatattctcttatggttccctaaaccagtaacctgtcccaatgcccaccgttgctgtctttttttaccacctactacatggcagagaggatagtcagacaaccaaactatcccacagactcctaacccgaatctatatgactgttttagactggtaaatctcattggaacagatggaaataatttccctt

SEQ ID NO: 646 - DNA, 9302 bp, Homo sapiens
  SITE (8509): n equals a,t,g, or c
ggcggctggtccagctgggcagagtggtcaccctgctccaaccgctgtggccgaggctggcagaagcgcacccggacctgcaccaaccccgctccactcaacggaggggccttctgcgagggccaggcattccagaagaccgcctgcaccaccatctgcccaggtaaggagccttgtccatgtccagccccaccccgaaccctgtcccaccttctgttttgtgtgccagagccgggacagccattctctccccagcatggggagcagaaggtgcttgtcccgagcccacagccggctgcccaggctgactagatgctctgatctctgaccccttattctgccctgggctgctggtgagatggaggcagaggctttgagggttagccccttctccctgaccctctagcctgggctcttctgccctccaagctgagggttctcagtgtcagcatgtcagccccaggccaaggtttcagagctccccggcctcagggacagcctgttgctcctgactgttaagacacaccgtggccacagaccctattcatactgacagtcctcctattcctctcatcctctgtgcagcccctctgctcccctacccccgcacatgtgctgtgttctctcccttgggttgtatgtttgtgcctacgctgtttttctttaccctgggtttgtgtctgtgtgtgtaaatcgtgcactgggctatatcgtgttgatgaccttatacatctatctgtaccctctttgtccacctgccaggtgcatctggctgttcattggcatggggttatgtggatatcatgtggatttctctgtgtggcacacatgtgttctgggttcctcatttccttccatggtgtgtatgcatgcatgtgtgttggcacattgctctgttctgcacacataactatgtgtgcacatgtctctgcgtgcacatgctcctgtatgccatgctcttacagtcgatggggcgtggacggagtggagcaagtggtcagcctgcagcactgagtgtgcccactggcgtagccgcgagtgcatggcgcccccaccccagaacggaggccgtgactgcagcgggacgctgctcgactctaagaactgcacagatgggctgtgcatgcaaagtgagtcacagggaaggtggggccctgggggtggggactctggagccatgtaagggtcccccaaacccggccccatgcctcagtgcccagcctgcagcacggcagtcctcagggcctctgtccccccaccacatccatcatctcatctcatccttcccattgccttctctgccaccctttccctgtcacctatgtcattgtctttccctttatttcccttgacagataagaaaactctaagcgaccccaacagccaccgtaagtcccatttcatggctgtcctctttcctctgggggatccctggttctctttggctggcttttcccgggatcagggtgcagggcagggagagctgaaggtgcctacccaccccccacgggatcatctacacctgacactgcatgtgtctgcatctccatcaccggcagacaggcaaacccttggctgacagaaaagaaaggccttagggcaccctactgagcctcctctcataagaggggaaactgagtcacagagagaggaagggacttggccagagacacaggcaagaaatagtagagccaagatttgaacccaaatatttttatagccaaagctgttgttcttaaccatatgcccttggccctcctctctgggccaaggccgggacatcaccactccagtcccccctcatgccccttgctgtacctctctgccccagcagctgggccaagcctcccaaattgtctctgttgcccgctgccctgcgtcagctctggagggctcaccctccagccccagaggctgcgccaccactgcaatcatatcagagcagcaaagccacttgagcaggttggcccatggtaattaaaccacaatttccagttagttctggaatcataaaatcagtgaggccctcggccgagctcactgggggtcgggctggggatgattcaagtgtaagtcaccaggcaagtggccccagtgtcagtgaaggcattaggaggcagagccaagctgggggaaccatttctctgctgaaccaggagcccagccctgaggggtcctctggggagcccaagagtgagggctgctgaggagagatacagggggacagaagtcggaagtgggcagacatccggggctgggagccatgccctgccttgctgaaagccttaggctgacgccaagtgcagggtgtggaggactccaggcagaggaagcagggctacttctctgagggccccccagggaggaagtgcgtggacaggtgcttcctggagctcccaaaggaagcaaggggaagagcagccatcttggccgccatttttgctctccctgaactgcccagtgtgaaagccgttcaaacttatacttagcttaattaaaattaaataaatttttaaattcagttcctcagcggtactggctacatttgagttgttcaggagccatatgtgactagtggctgcatacgggacagtgcagccataggattttctaccactgtagaaagctccaccagacaaccctacttcagaccctgccactttgaccttgaggcttcccgcctggccatgtttgcctgggggaggaaagtgtagccgtgggttgcctccctgggcccatccttcttcccacatgctcacctcttctccaccgcattgttgtgcatctcattccacttcttcagctccccgtccctccacttcccaccctcagagcatggaatggaagaagagttcagaacagctacttacaaagataacagagccagaagaccttatctacatacaaagataacagagccaggacctttggtcctctggaaattgctacagactcagaggtttcagccccagcactcacagggcaaattatgtagccccagtgactctgagccacagaccctgtctcatcagcagcaagcaatgaattaacacatggcatgaacatgtttgttcttttgtttctcatgccacaactaggagggcagtaaggcagggacttcgagcccattttacccatagagaggttcaaggctagccccaggttgccagcctgtgtaggcagggctcagactggaactcagcaccgggccggttggccctgggccctgccctttccagggacccagggcctccctgattgccccagggcctggtctctgctgccccttatgtggtcctcctgtccccgcagtgctggaggcctcaggggatgcggcgctgtatgcggggctcgtggtggccatcttcgtggtcgtggcaatcctcatggcggtgggggtggtggtgtaccgccgcaactgccgtgacttcgacacagacatcactgactcatctgctgccctgactggtggtttccaccccgtcaactttaagacggcaaggcccagtaagaacccgaggatgtctggggtggttggcagaggcaggatacccagagggctctggtggtacccagaccagagccaggctcctgactccctcccagggtttttccagagtttgctctagagataactatgtggatgggtatggattagagaactaccgagaaggaagggagtgacccaggctgcgggattcccaaagcttcctgcagctggcagcaattgggcctttcacagctggacatttgggtgggattttgcagtgggagctgggccagtgagctgaggcacagctgggtctgactatagcccctactcctgcaggcaacccgcagctcctacacccctctgtgcctcctgacctgacagccagcgccggcatctaccgcggacccgtgtatgccctgcaggactccaccgacaaaatccccatgaccaactctcctctgctggaccccttacccagccttaaggtcaaggtctacagctccagcaccacgggctctgggccaggcctggcagatggggctgacctgctgggggtcttgccgcctggcacataccctagcgatttcgcccgggacacccacttcctgcacctgcgcagcgccagcctcggttcccagcagctcttgggcctgccccgagacccagggagcagcgtcagcggcacctttggctgcctgggtgggaggctcagcatccccggcacaggtgagcccctgccctgcttgtgcgtcagcctggccttagcacctcctctgtggactgccccaacacccatccagcagaagatagggctgccctaatcccatctcacagatggggaaagggaggcctgaaggcaggaagtgagtataaaatagagaggtctgactagaaaagctaggcttcaagcctgcctatgccctcactagggcagaggaaccttgggccagccatcttctaagcttcagtgtctctgttgtgtgagagagaatattccaacgtagttcagcagacctacaaagcactgtcctggaactagcagcagagggacaggggcgcctgttttagtttgcaaagccagcaattaacagcttcccagcatcatatactaagctaggagtagagctggcacttggacctccagacaccatagcaatgtcagagacccctgtcttcctagacaagccagcactggtcagtggcctggcctctgcttgcatccagtccccagaccctgtctcccacccctggctggggactacctggagctcaggagatatctttctctcccagccccaagctggggccaacttcccaaacacttgttctcctaagctcctggactccctgctgacttccctctccccctaggggtcagcttgctggtgcccaatggagccattccccagggcaagttctacgagatgtatctactcatcaacaaggcagaaagtaccctgtgagtagagccccagccgctgctcctttttcttcctcccatcccttgctgcctgcccacacgtggctccccttctaagcctgatgccaagaccaaacagtcctccaaggaaagtattaatcttactgtgtccatattgaaaacttgcagaaccaacaccgtaaattgtaaaactcaaaggcggttgacaagctggctacaagtgtgacaaagggctgaatatccttactatgtaaagagattttgtagatcaataagaaaaagtaaacatctcactgtgaaaatgggcaaaggatatgaacacgtgattcacacacactgtctcacacaaacacactggccagtaggttatgagaaaatgtttagtctaatttgcagagaaaactaatgaaaaccaccacaaggtatactgggatttttaaattattattattaaggaatttgcaaggaccttttcccaaatgataataccctcttgctggcaagggggtgggaacatggccttctgtggcacgtggccgggagtatagattggaaccagctccctggagggcactttagcgtgacctattgaaaaccttccaagattacacaaccttggaaaatataagccaggaattttgagctatgataatgttgcagtggaatagcaaaaatctggaaacaacctcaaggttcatgccattttctttgcctcctttgcccccatgacctctgggaatgcagagccctgagtggcaaagagctgccctccacctcccgggccctgggcagacttgggagcccagcaggagcctgcacctttgccgagctcttcactgcctctctcctaccctgtgtcctcctccagcccgctttcagaagggacccagacagtattgagcccctcggtgacctgtggacccacaggcctcctgctgtgccgccccgtcatcctcaccatgccccactgtgccgaagtcagtgcccgtgactggatctttcagctcaagacccaggcccaccagggccactgggaggtgaggagccacggtgaaggctggcccagctctcccaacctgcccagggaggcaaaagaaagcccttttcctctggcccagcctgaataactgtgaccactaccccacccttgctgtcccctacaggaggtggtgaccctggatgaggagaccctgaacacaccctgctactgccagctggagcccagggcctgtcacatcctgctggaccagctgggcacctacgtgttcacgggcgagtcctattcccgctcagcagtcaagcggctccagctggccgtcttcgcccccgccctctgcacctccctggagtacagcctccgggtctactgcctggaggacacgcctgtagcactgaaggtagggccagctgcaggtgcccacacagccctggccggccagctgcatgatccctgccagaatcccccaccccaggctcatgggtcctcccaggaacccctccccgccaccagcattattaggtcccgcttgcgaccctcacacactgaaacagccttgggcacagggcctgcctcaccaagatccaggttagaggtgggaggcagaccagggatccctgaaggctctgatggggtctgccccaggactgagggagcatcagactgggaggggcttgggctggtagggagggactctgagaaggctgacatgtaggagtttcagcagaaaggagtgaagggcattccagaccgacagaaatgactgcgtttcataagcgtttcagcatgaccaactaaaaggcatagggaatgtgtgaatgtgagggcgggcgagatgggcagggctcagcttcccagaagcctcagggccccttgccaaggaatttggaatccatccggcaggaaggggaatggacctggtagacacctgttcacaggtgctctttagaaagcccctgtggctatacttgggtgggtagatgagaggtggagaggcctgttgggaagctggggttggaccctgggccacagggagtgacagcagccaggagaggcggggctggatgctgcgtgtgctcagtcaaatggacagaaccggtgactgatgggatgggcagtgggagagggaagttaaggctgacagccaggctcctagcatatgcagaaggatggagagcggtgccccaagtgaaggaagggtcatgcagatgaggggtggttgggacaggagggagggaaggggagggaagggtcttttagtacctagagcctgatgatggcaggtatggagccccgtgttagcaccactgtcccctgccagcctcagagcccttgtgcattcccccaagttctcctcccattctcaggagctcaggctcatcctgatgtaaccctggaagcatacagacacttggccgtgtgtgagccccttcccctccctcctcccatctgccctcctcagcgcctcatggtcctttcccatggctccatgcactttctgttcctgctccctggccccgtccagctccttcatctcccaggctcatgggacttgtcccaaagcccacactgcagacaacataggtgaaaggcccatgggagaaggagtgtcccctgctgggaggaccctggcttgagatgccagtggccctgtgatgggtgcaaggtgcctgggaagtgctcctgcagctggatctcttggtcctggggcgttggctaatggccagctttggccagagagtggtatagaaatcaagagagaagttaccaggtttgggcctgatggcattctttgtttattcaaccctccatccatccatctgtccatctgttcatccatccatctgtctttctgttcatctgaccatatacccattcagtcagcagcccatctgtttacccagtcattgctcgtctatccattcatttatcttttcttccatctttctattcatatacccatccttgtatatccatctgtatattcatctgtctgtctttctagccatcaatccgtttatccatccatctgtccatttattagtccctctagccatacggtcatctatagattcattcatctagtcatctttcccactgtctgtctatccatccgtcatctattcatcttctcacaccataagccctctgtgagctcttgcaaatgcccagccatgcactcagatgggcccctgccccctgccccgcacagtgccacagaagaggcccattggccaggtgtgatgggttccccttccccatgcccctggcccacaggaggtgctggagctggagcggactctgggcggatacttggtggaggagccgaaaccgctaatgttcaaggacagttaccacaacctgcgcctctccctccatgacctcccccatgcccattggaggagcaagctgctggccaaataccaggtgagggctgggctgatggatggggaggggcaccacttaagggctgcccggaaagcccagctccctcccgggccctgcctcctagctctgtcctgtggacttacccctccctggatctctcactgtctctgtctcctcccaccccagtctntaggctttcagccatccccaggcacgtccccaaattcagggcaatgggcagccacatgcacacttctgccctgtcacaccctcacacgcacagacgactatgcccttcatcctcacagaggctcctcacccttcagggcatgccctcctggcagactgcccatctcatctctgacagccacagcccgctgcccacccagcagcgcctgagaccacaaggccccctagcccctgacacacacacacctgtgcctttccctcccccacctacccaccctcagctcccttctggaactgagggcctgacaccaactcagctggctagcttagggcacttgacccctccctatctgggtggagaggcctgaactgccccccaaagctcccaaccctccctgagcctccatttctatgaggacagggcaggctggccttgcctgcctggtcctgaccccctcctcctgcaggagatccccttctatcacatttggagtggcagccagaaggccctccactgcactttcaccctggagaggcacagcttggcctccacagagctcacctgcaagatctgcgtgcggcaagtggaaggggagggccagatattccagctgcataccactctggcagaggtgagggaagtcggggccacatattccagctggacaccacactgccgggggtgagggaagggtggggcagattttccagctgcacaccaccctggcggaggtgagggaagggtggggccgatattccagctgcacaccaccctggcgtaggtggggaagggg

What is claimed is:

1. An isolated nucleic acid molecule comprising a polynucleotide having a nucleotide sequence at least 95% identical to a sequence selected from the group consisting of:
(a) a polynucleotide fragment of SEQ ID NO:X or a polynucleotide fragment of the cDNA sequence contained in Clone ID NO:Z, which is hybridizable to SEQ ID NO:X;
(b) a polynucleotide encoding a polypeptide fragment of SEQ ID NO:Y or a polypeptide fragment encoded by the cDNA sequence contained in cDNA Clone ID NO:Z, which is hybridizable to SEQ ID NO:X;
(c) a polynucleotide encoding a polypeptide fragment of a polypeptide encoded by SEQ ID NO:X or a polypeptide fragment encoded by the cDNA sequence contained in cDNA Clone ID NO:Z, which is hybridizable to SEQ ID NO:X;
(d) a polynucleotide encoding a polypeptide domain of SEQ ID NO:Y or a polypeptide domain encoded by the cDNA sequence contained in cDNA Clone ID NO:Z, which is hybridizable to SEQ ID NO:X;
(e) a polynucleotide encoding a polypeptide epitope of SEQ ID NO:Y or a polypeptide epitope encoded by the cDNA sequence contained in cDNA Clone ID NO:Z, which is hybridizable to SEQ ID NO:X;
(f) a polynucleotide encoding a polypeptide of SEQ ID NO:Y or the cDNA sequence contained in cDNA Clone ID NO:Z, which is hybridizable to SEQ ID NO:X, having biological activity;
(g) a polynucleotide which is a variant of SEQ ID NO:X;
(h) a polynucleotide which is an allelic variant of SEQ ID NO:X;
(i) a polynucleotide which encodes a species homologue of the SEQ ID NO:Y;
(j) a polynucleotide capable of hybridizing under stringent conditions to any one of the polynucleotides specified in (a)-(i), wherein said polynucleotide does not hybridize under stringent conditions to a nucleic acid molecule having a nucleotide sequence of only A residues or of only T residues.

2. The isolated nucleic acid molecule of claim 1, wherein the polynucleotide fragment comprises a nucleotide sequence encoding a protein.

3. The isolated nucleic acid molecule of claim 1, wherein the polynucleotide fragment comprises a nucleotide sequence encoding the sequence identified as SEQ ID NO:Y or the polypeptide encoded by the cDNA sequence contained in cDNA Clone ID NO:Z, which is hybridizable to SEQ ID NO:X.

4. The isolated nucleic acid molecule of claim 1, wherein the polynucleotide fragment comprises the entire nucleotide sequence of SEQ ID NO:X or the cDNA sequence contained in cDNA Clone ID NO:Z, which is hybridizable to SEQ ID NO:X.

5. The isolated nucleic acid molecule of claim 2, wherein the nucleotide sequence comprises sequential nucleotide deletions from either the C-terminus or the N-terminus.

6. The isolated nucleic acid molecule of claim 3, wherein the nucleotide sequence comprises sequential nucleotide deletions from either the C-terminus or the N-terminus.

7. A recombinant vector comprising the isolated nucleic acid molecule of claim 1.

8. A method of making a recombinant host cell comprising the isolated nucleic acid molecule of claim 1.

9. A recombinant host cell produced by the method of claim 8.

10. The recombinant host cell of claim 9 comprising vector sequences.

11. An isolated polypeptide comprising an amino acid sequence at least 90% identical to a sequence selected from the group consisting of:
(a) a polypeptide fragment of SEQ ID NO:Y or the encoded sequence contained in cDNA Clone ID NO:Z;
(b) a polypeptide fragment of SEQ ID NO:Y or the encoded sequence contained in cDNA Clone ID NO:Z, having biological activity;
(c) a polypeptide domain of SEQ ID NO:Y or the encoded sequence contained in cDNA Clone ID NO:Z;
(d) a polypeptide epitope of SEQ ID NO:Y or the encoded sequence contained in cDNA Clone ID NO:Z;
(e) a full length protein of SEQ ID NO:Y or the encoded sequence contained in cDNA Clone ID NO:Z;
(f) a variant of SEQ ID NO:Y;
(g) an allelic variant of SEQ ID NO:Y; or
(h) a species homologue of the SEQ ID NO:Y.

12. The isolated polypeptide of claim 11, wherein the full length protein comprises sequential amino acid deletions from either the C-terminus or the N-terminus.

13. An isolated antibody that binds specifically to the isolated polypeptide of claim 11.

14. A recombinant host cell that expresses the isolated polypeptide of claim 11.

15. A method of making an isolated polypeptide comprising:
(a) culturing the recombinant host cell of claim 14 under conditions such that said polypeptide is expressed; and
(b) recovering said polypeptide.

16. The polypeptide produced by claim 15.

17. A method for preventing, treating, or ameliorating a medical condition, comprising administering to a mammalian subject a therapeutically effective amount of the polynucleotide of claim 1.

18. A method of diagnosing a pathological condition or a susceptibility to a pathological condition in a subject comprising:
(a) determining the presence or absence of a mutation in the polynucleotide of claim 1; and
(b) diagnosing a pathological condition or a susceptibility to a pathological condition based on the presence or absence of said mutation.

19. A method of diagnosing a pathological condition or a susceptibility to a pathological condition in a subject comprising:
(a) determining the presence or amount of expression of the polypeptide of claim 11 in a biological sample; and
(b) diagnosing a pathological condition or a susceptibility to a pathological condition based on the presence or amount of expression of the polypeptide.

20. A method for identifying a binding partner to the polypeptide of claim 11 comprising:
(a) contacting the polypeptide of claim 11 with a binding partner; and
(b) determining whether the binding partner effects an activity of the polypeptide.

21. The gene corresponding to the cDNA sequence of SEQ ID NO:Y.

22. A method of identifying an activity in a biological assay, wherein the method comprises:
(a) expressing SEQ ID NO:X in a cell;
(b) isolating the supernatant;
(c) detecting an activity in a biological assay; and identifying the protein in the supernatant having the activity.

23. The product produced by the method of claim 20.

24. A method for preventing, treating, or ameliorating a medical condition, comprising administering to a mammalian subject a therapeutically effective amount of the polypeptide of claim 11.
